(19) United States
(12) Patent Application Publication
(10) Pub. No.: US 2023/0108687 A1
(43) Pub. Date: Apr. 6, 2023

(54) GENE EDITING METHODS FOR TREATING SPINAL MUSCULAR ATROPHY

(71) Applicants: The Broad Institute, Inc., Cambridge, MA (US); President and Fellows of Harvard College, Cambridge, MA (US)

(72) Inventors: David R. Liu, Cambridge, MA (US); Mandana Arbab, Cambridge, MA (US)

(73) Assignees: The Broad Institute, Inc., Cambridge, MA (US); President and Fellows of Harvard College, Cambridge, MA (US)

(21) Appl. No.: 17/797,700

(22) PCT Filed: Feb. 5, 2021
(86) PCT No.: PCT/US2021/016929

§ 371 Date: Aug. 4, 2022

Related U.S. Application Data
(60) Provisional application No. 62/970,670, filed on Feb. 5, 2020.

(51) Int. Cl. A61K 38/46; C12N 9/22; C12N 9/78; C12N 15/11; C12N 15/90; A61K 31/713; A61K 31/519; A61K 38/50; A61P 25/28; A61P 21/00

(52) U.S. Cl. CPC A61K 38/465; C12N 9/22; C12N 9/78; C12N 15/11; C12N 15/907; A61K 31/713; A61K 31/519; A61K 38/50; A61P 25/28; A61P 21/00; C12N 2310/20; C12N 2710/10043; C12N 2750/14143; C12N 2320/33; C12N 2800/80; C12N 2320/31

(57) ABSTRACT

The disclosure provides methods, base editors, vectors encoding base editors and cognate gRNAs, and compositions and kits comprise said components, for installing nucleobase edits to the SMN2 locus to increase the activity and/or amount and/or stability of SMN2 protein in a cell, thereby treating Spinal Muscular Atrophy. In certain aspect, the disclosure provides compositions and methods to edit C840T of exon 7 of the SMN2 gene, or installing another one or more nucleobase edits which have the effect of removing or inactivating a degron, such as the C-terminal portion of the region encoded by exon 6 or the 4-amino acid region encoded by exon 8 (i.e., the EMLA (SEQ ID NO: 466)-tail) so as to remove or limit their degron activity to reduce, mitigate, or eliminate the intracellular degradation of the SMN2 protein.

### RELATED APPLICATIONS

[0001] This application claims priority under 35 U.S.C. § 119(e) to U.S. Provisional Application, U.S. Ser. No. 62/970,670, filed Feb. 5, 2020, which is incorporated herein by reference.

### BACKGROUND OF THE INVENTION

[0002] Spinal muscular atrophy (SMA) is a rare progressive motor neuron degeneration disorder that arises at various ages, including in infants. The disease is debilitating and is the leading heredity childhood disorder that results in fatality.^{1, 2} A rare condition, SMA occurs in approximately 1 in 11,000 births and manifests as a result of insufficient survival motor neuron (SMN) protein in spinal motor neurons encoded by the SMN1 gene, leading to atrophy of skeletal muscle, paralysis of the patient, and eventual death. Symptoms include muscle weakness, poor muscle tone, weak cry, limpness or a tendency to flop, difficulty sucking or swallowing, accumulation of secretions in the lungs or throat, feeding difficulties, and increased susceptibility to respiratory tract infections. The legs tend to be weaker than the arms and developmental milestones often cannot be reached. In general, the earlier the symptoms appear, the shorter the individual's lifespan.

[0003] The low levels of SMN protein typically result from the homozygous deletion of both copies of the telomere-located SMN1 gene.¹ However, most individuals have a second, virtually duplicate gene to SMN1 known as the survival motor neuron 2 (SMN2) gene, which can compensate to varying degrees for the body's loss of the SMN1 gene. The SMN2 gene differs from the SMN1 gene by five nucleotides, which importantly includes a C-to-T nucleotide change in exon 7 (also referred to as “C840T” or C6U” in the resulting mRNA). C840T in the SMN2 gene results in the “skipping” or “exclusion” of exon 7 in the final mRNA transcript, which in turn, encodes a truncated but partially-functional SMN protein. See FIG. 1A. This exon skipping event due to C840T occurs about 90% of the time. Thus, the majority of SMN protein produced by the SMN2 gene is truncated and only partially functional. Moreover, the truncate protein is more susceptible to degradation due to independent signaling of the proteosome complex by the exon 6-encoded portion and the terminal exon 8-encoded EMLA (SEQ ID NO: 466) sequence^{8,9}.

[0004] The copy number of the SMN2 gene can also vary among SMA individuals and can affect the severity of the disorder. In general, a higher SMN2 gene copy number correlates with less severe disease as the level of functional SMN2 protein is increased with gene copy number. As such, SMN2 copy numbers are a strong determinant of patients' symptomatic outcomes.⁵⁻⁷ There are four recognized categories of SMA which differ by degree of severity, as well as other aspects.

[0005] Type 0 SMA is the rarest and most severe form of the condition and is apparent before birth. Affected infants are often born with joint deformities and have extremely weak muscle tone at birth. Type 0 SMA infants have weak respiratory muscles and often do not survive past infancy due to respiratory failure.

[0006] Type 1 SMA, which is also referred to as Werdnig-Hoffmann disease, is the most common form of the condition. It is a severe form of the disorder with muscle weakness evident at birth or within the first few months of life. Most children with type 1 SMA cannot control their head movements and cannot sit without assistance. These types of children may also experience difficulty swallowing, which can lead to poor feeding and growth. Also, due to weakened respiratory muscles and a bell-shaped chest condition, type 1 SMA children can also have severe breathing problems. Most children with type I SMA do not survive past early childhood due to respiratory failure.

[0007] Type 2 SMA, which is also referred to as Dubowitz disease, is characterized by muscle weakness that develops in children between ages 6 and 12 months. Children with this type can sit without support, although they may need help getting to a seated position. During later childhood, the muscle weakness worsens to the point where the individual may need support to sit. Individuals with type 2 SMA cannot stand or walk unaided. They often have involuntary tremors, scoliosis, and respiratory muscle weakness that can be life-threatening. The life span of individuals with spinal muscular atrophy type 2 varies and can be as long as their 20s or 30s.

[0008] Type 3 SMA, which is also called Kugelberg-Welander disease, typically has an onset that begins after early childhood. Individuals with this condition can stand and walk unaided, but over time, walking and climbing stairs may become increasingly difficult. Many affected individuals require wheelchair assistance later in life. Individuals with type 3 SMA typically have a normal life expectancy.

[0009] Type 4 SMA is the rarest of the SMA conditions and often does not begin until early adulthood. Affected individuals usually experience mild to moderate muscle weakness, tremors, and mild breathing problems. People with spinal SMA type 4 have a normal life expectancy.

[0010] The genetics of SMA are well understood, and approaches involving gene therapies have been pursued. Antisense oligonucleotides (ASOs) (e.g., nusinersen, approved in the U.S. as SPINRAZA® in 2016) encoding short sequences that target SMN2 exon 7 splicing regulatory sites that aid in the recruitment of the splicing machinery to the acceptor splice site to create corrected SMN mRNA transcripts that no longer translate into truncated, unstable proteins.^{10, 11} While this method has proven effective in upregulating SMN even in vivo in mouse models of SMA, the post-transcriptional modification of ASOs is only transient and thus, not curative. On the other hand, genetic modification that corrects SMN protein stability would lead to a lasting cure for SMA. However, no such therapies are available to date.

### SUMMARY OF THE INVENTION

[0011] The present disclosure relates in part to the inventors' discovery of base editing strategies that may be used to effectively target the SMN2 genomic locus to install edits that affect SMN protein production and stability, thereby providing a new platform for treating SMA that goes beyond the currently available treatments, such as, antisense oligonucleotide treatments (e.g., nusinersen) which are transient in nature. The methods and compositions disclosed herein provide a treatment for SMA. Accordingly, the disclosure provides methods, base editors, gRNAs, complexes of base editors and gRNAs, nucleic acids and vectors encoding base editors and cognate gRNAs (e.g., gRNAs that the base editors provided herein bind), compositions and kits comprising said components, and systems for delivering said components. The aspects provided in this disclosure are useful for editing one or more genomic sequences associated with SMA, such as, but not limited to, editing C840T of exon 7 of the SMN2 gene. They are also useful for installing one or more nucleobase edits which have the effect of removing or inactivating a degron, such as the C-terminal portion of the region encoded by exon 6 or the 4-amino acid region encoded by exon 8 (i.e., the EMLA (SEQ ID NO: 466)-tail) so as to remove or limit their degron activity to reduce, mitigate, or eliminate the degradation of the SMN2 protein.

[0012] Accordingly, aspects of the disclosure provide napDNAbp domains, deaminase domains, base editors comprising said napDNAbp domains and deaminase domains, guide RNAs for targeting the SMN2 locus, nucleic acids and vectors encoding napDNAbp domains, deaminase domains, guide RNAs, and/or base editor fusions comprising said napDNAbp and deaminase domains, kits, and methods for modifying a polynucleotide (e.g., DNA) using a deaminase (e.g., an adenosine or cytidine deaminase) and a nucleic acid programmable DNA binding protein (e.g., Cas9) to correct the SNP and/or to increase the stability of the SMN protein products. Such deaminases are described in International Application Nos.: PCT/US2017/045381 (WO 2018/027078), filed Aug. 3, 2017; PCT/US2018/056146 (WO 2019/079347), filed Oct. 16, 2018; PCT/US2019/033848 (WO 2019/226953), filed May 23, 2019; PCT/US2019/018285 (WO 2019/161251), filed Feb. 15, 2019; PCT/US2019/019794 (WO 2019/168953), filed Feb. 27, 2019; the entire contents of each of which are incorporated herein by reference.

[0013] In some embodiments, fusion proteins provided herein (e.g., adenosine or cytidine base editors) are used to edit C840T in the SMN2 gene. For example, the disclosure provides methods and compositions for editing C840T in exon 7 of an SMN2 gene, e.g., compositions including those gRNA sequences disclosed herein, including in the Examples. In other embodiments, fusion proteins provided herein (e.g., adenosine or cytidine base editors) are used to induce a frameshift mutation in exon 8 to prevent generation of the EMLA (SEQ ID NO: 466) tail, which signals protein degradation. In still other embodiments, fusion proteins provided herein (e.g., adenosine or cytidine base editors) are used to destroy a fifth codon stop sequence in exon 8, resulting in the addition of five amino acids onto the C-terminus of the translated protein. In another embodiment, fusion proteins provided herein (e.g., adenosine or cytidine base editors) are used to modify a specific amino acid of SMN2-derived proteins. For example, the fusion protein may be used to modify the S270 amino acid of SMN2's exon 6, a modification that has been shown to reduce the degradation rate of the resulting protein. The S270 modification is exemplified in Example 1 herein. Without wishing to be bound by any particular theory, a modified SMN2 protein comprising the amino acid sequence encoded by exon 7 is not sensitive to cellular degradation, unlike the wild type, truncated SMN2 product formed from the wild type SMN2 gene as a result of exon 7-skipping. The overall activity and/or production of the modified SMN2 protein (i.e., now including the amino acid region encoded by exon 7) are increased, thereby treating SMA. Further, the increased production and/or activity of the modified SMN2 protein relates to the elimination or reduction in protein degradation associated with the truncated SMN2 wild type protein.

[0014] In some embodiments, the one or more nucleobase edits installed in the SMN2 gene locus result in a modified SMN2 gene product having increased stability, activity, and/or production relative to the wild type, truncated SMN2 protein of SEQ ID NO: 4. In various embodiments, the genome editing strategies disclosed herein can be implemented to target the editing of specific nucleobase positions in the SMN2 gene locus, which when edited, impart the modified SMN2 gene product with increased stability, activity, and/or production. In some embodiments, SMN2 is a centromeric survival of motor neuron 2 from Homo sapiens. For example, Gene ID: 6607, which may also be referred to as SMNC, BCD541, GEMIN1, TDRD16B, or C-BCD541. See, for example, NG_008728.1 RefSeqGene.

[0015] For example, in one embodiment, the genome editing strategies disclosed herein target position 6 of exon 7 of the SMN2 gene locus, which can be an inactive splice acceptor site due to the presence of a T in place of a C in exon 7 at that position. This nucleobase position is often referred to as C840T, i.e., which bears a T at position 6 of exon 7. By contrast, the corresponding position in the SMN1 gene presents a C at position 6 of exon 7, which defines an active splice site. Thus, in one embodiment, the genome editing methods and compositions may be used to introduce a T-to-C edit at position 6 of exon 7 of the SMN2 gene using an adenosine base editor, i.e., editing C840T to a C at position 6 of exon 7 and restoring proper splicing of exon 7, thereby encoding a modified SMN2 protein that includes the amino acid sequence encoded by exon 7.

[0016] In another embodiment, the genome editing strategies disclosed herein target the removal of one or more degrons present in the encoded SMN2 protein, thereby reducing or eliminating the degron-dependent degradation of the SMN2 protein. For example, the disclosure contemplates the use of genome editing to eliminate the 4-amino acid sequence tail of NH₃-EMLA (SEQ ID NO: 466)-COOH encoded by exon 8 of the SMN2 gene—which functions as a degron—thereby minimizing or eliminating the degradation associated with said degron. In certain aspects, the EMLA (SEQ ID NO: 466) sequence can be removed by using genome editing to remove the exon 8 splice site, such that exon 8 is eliminated from the final messenger RNA, and thus, not translated into the resulting SMN2 protein.

[0017] In yet another embodiment as described in Example 2, the genome editing strategies disclosed herein target the modification of one or more degrons present in the encoded SMN2 protein, thereby reducing or eliminating the degradation associated with said one or more degrons. For example, the disclosure contemplates the use of genome editing to eliminate a stop codon corresponding to the C-terminal end of the region encoded by exon 8 (i.e., which codes for the 4-amino acid sequence tail of EMLA (SEQ ID NO: 466)) such that the 4-amino acid EMLA (SEQ ID NO: 466) tail is lengthened to include additional amino acids, e.g., 2-10 additional amino acid (for example, 5 additional amino acids), which prevents or limits the degradation associated with said EMLA (SEQ ID NO: 466) tail.

[0018] In another embodiment, the disclosure provides a genome editing strategy comprising modification of the ISS-N1 splicing silencer in exon 7. Modification of the ISS-N1 splicing silencer (e.g., using nucleases or base editors) prevents skipping of exon 7 in SMN transcripts.

[0019] Aspects of the disclosure provide methods and compositions for deaminating an adenine nucleobase (A) in an SMN2 gene using an adenine base editor (ABE) bound to a guide RNA (gRNA), wherein the gRNA comprises a guide sequence that is complementary to a target nucleic acid sequence in the SNM2 gene.

[0020] Other aspects of the disclosure provide methods and compositions for deaminating an cytosine nucleobase (C) in an SMN2 gene using a cytidine base editor (CBE) bound to a guide RNA (gRNA), wherein the gRNA comprises a guide sequence that is complementary to a target nucleic acid sequence in the SNM2 gene.

[0021] In some embodiments, the base editor is delivered in vivo to a subject. In some embodiments, the base editor is delivered in two parts, for example, by using a split-intein strategy. In some embodiments, editing of C840T in exon 7 results in an increase, e.g., at least 5%, 10%, 20%, 30%, 40%, 50%, 60%, 70%, 80%, 90%, 95%, 96%, 97%, 98%, 99%, 100%, or more increase, in the level of SMN protein in a subject, in an organ or tissue of a subject (e.g., brain, heart, lungs, liver, intestine, and/or pancreas), or in a cell of a subject (e.g., neuron, such as a motor neuron). In certain embodiments, the base editor is delivered by intracerebroventricular injection.

[0022] In some embodiments, the disclosure provides compositions comprising a base editor (e.g., adenine base editor) and a guide RNA (gRNA). In some embodiments, the gRNA directs the base editor in proximity to a point mutation in the SMN2 gene, for example, a point mutation in exon 7. In some embodiments, the gRNA directs the base editor within 1, 2, 3, 4, 5, 6, 7, 8, 9, 10, 11, 12, 13, 14, 15, 16, 17, 18, 19, or 20 base pairs of a point mutation within the SMN2 gene. In some embodiments, the gRNA comprises the protospacer sequence 5′-ATTTTGTCTAAAACCctgta-3′ (SEQ ID NO: 364), where the nucleotide target is indicated in bold. It should be appreciated that the Ts indicated in the gRNA sequence are uracil (Us) in the RNA sequence. Accordingly, in some embodiments, the gRNA comprises the sequence 5′-AUUUUGUCUAAAACCcugua-3′ (SEQ ID NO: 365). In some embodiments, the guide sequence of the gRNA comprises a nucleic acid sequence selected from the group consisting of 5′-TTTGTCTAAAACCCTGTAAG-3′ (SEQ ID NO: 366), 5′-TTTTGTCTAAAACCCTGTAA-3′ (SEQ ID NO: 368), 5′-TGATTTTGTCTAAAACCC-3′ (SEQ ID NO: 370), 5′-GATTTTGTCTAAAACCCT-3′ (SEQ ID NO: 372), 5′-ATTTTGTCTAAAACCCTG-3′ (SEQ ID NO: 374), 5′-GTCTAAAACCCTGTAAGG-3′ (SEQ ID NO: 376), and 5′-TCTAAAACCCTGTAAGGA-3′ (SEQ ID NO: 378). As noted previously, the gRNA sequence may comprise uracil (U) instead of thymine (T). Therefore, in some embodiments, the guide sequence of the gRNA comprises a nucleic acid sequence selected from the group consisting of 5′-UUUGUCUAAAACCCUGUAAG-3′ (SEQ ID NO: 367), 5′-UUUUGUCUAAAACCCUGUAA-3′ (SEQ ID NO: 369), 5′-UGAUUUUGUCUAAAACCC-3′ (SEQ ID NO: 371), 5′-GAUUUUGUCUAAAACCCU-3′ (SEQ ID NO: 373), 5′-AUUUUGUCUAAAACCCUG-3′ (SEQ ID NO: 375), 5′-GUCUAAAACCCUGUAAGG-3′ (SEQ ID NO: 377), and 5′-UCUAAAACCCUGUAAGGA-3′ (SEQ ID NO: 379).

[0023] In some embodiments, the disclosure provides compositions comprising a fusion protein (e.g., adenosine base editor or cytidine base editor) and a guide RNA (gRNA). In some embodiments, the gRNA directs the fusion protein in proximity to a stop sequence in the SMN2 gene, for example, in exon 8. In some embodiments, the gRNA directs the fusion protein within 1, 2, 3, 4, 5, 6, 7, 8, 9, 10, 11, 12, 13, 14, 15, 16, 17, 18, 19, or 20 base pairs of stop codon within the SMN2 gene. In some embodiments, the gRNA comprises a nucleic acid sequence selected from the group consisting of: 5′-TTTGCAGGAAATGCTGGCAT-3′ (SEQ ID NO: 381), 5′-TTCTCATTTGCAGGAAATGC-3′ (SEQ ID NO: 383), 5′-CATTTAGTGCTGCTCTATGC-3′ (SEQ ID NO: 385), 5′-CAGGAAATGCTGGCATAGAG-3′ (SEQ ID NO: 387), 5′-TTGCAGGAAATGCTGGCATA-3′ (SEQ ID NO: 389), 5′-ATTTGCAGGAAATGCTGGCA-3′ (SEQ ID NO: 391), and 5′-TGGCATAGAGCAGCACTAAA-3′ (SEQ ID NO: 393), where the nucleotide target is indicated in bold. It should be appreciated that the thymidines (Ts) indicated in the gRNA sequences above are uracils (Us) in the RNA sequence. Accordingly, in some embodiments, the gRNA comprises a sequence selected from the group consisting of:

(SEQ ID NO: 382)
5′-UUUGCAGGAAAUGCUGGCAU-3′,
(SEQ ID NO: 384)
5′-UUCUCAUUUGCAGGAAAUGC-3′,
(SEQ ID NO: 386)
5′-CAUUUAGUGCUGCUCUAUGC-3′,
(SEQ ID NO: 388)
5′-CAGGAAAUGCUGGCAUAGAG-3′,
(SEQ ID NO: 390)
5′-UUGCAGGAAAUGCUGGCAUA-3′,
(SEQ ID NO: 392)
5′-AUUUGCAGGAAAUGCUGGCA-3′,
and
(SEQ ID NO: 394)
5′-UGGCAUAGAGCAGCACUAAA-3′ .

[0024] In some embodiments, the disclosure provides compositions comprising a fusion protein (e.g., adenine base editor or cytidine base editor) and a guide RNA (gRNA). In some embodiments, the gRNA directs the fusion protein in proximity to a specific codon sequence in the SMN2 gene, for example, in exon 6. In one embodiment, the gRNA directs the fusion protein in proximity to the S270 amino acid of SMN2. In some embodiments, the gRNA directs the fusion protein within 1, 2, 3, 4, 5, 6, 7, 8, 9, 10, 11, 12, 13, 14, 15, 16, 17, 18, 19, or 20 base pairs of a specific codon within the SMN2 gene. In some embodiments, the gRNA comprises the nucleic acid sequence 5′-TGGCATAGAGCAGCACTAAA-3′ (SEQ ID NO: 393), where the nucleotide target is indicated in bold. It should be appreciated that the thymidine (Ts) indicated in the gRNA sequences above are uracil (Us) in the RNA sequence. Accordingly, in some embodiments, the gRNA comprises the sequence: 5′-UGGCAUAGAGCAGCACUAAA-3′ (SEQ ID NO: 394).

[0025] In some embodiments, the base editor nicks the target sequence that is complementary to the guide sequence. In some embodiments, the base editor is a circular permutant (CP) adenine base editor, such as the CP₁₀₄₁ base editor. In some embodiments, the base editor may be formulated as a split-intein base editor. The base editor may be, for example, wild-type SpCas9, SaCas9-KKH, Cas9-VQR, Cas9-VRQR, Cas9-VRER, Cas9-NG, CP1028, CP1041, CP1041-NG, Cpf1, iSpyMac, SpCas9-NRRH, or SpCas9-NRCH.

[0026] Compositions, kits, methods, systems, proteins, and nucleic acids, provided herein, in some embodiments, are used to treat a subject having or a subject suspected of having SMA.

[0027] Thus, in some aspects, the base editor and guide RNA complexes described herein may be useful for treating a disease or a disorder caused by a C to T mutation in a SMN2 gene. In some embodiments, deaminating the adenosine nucleobase in the SMN2 gene results in a T-A base pair in the SMN2 gene being mutated to a C-G base pair in the SMN2 gene. In some embodiments, deaminating the adenosine nucleobase in the SMN2 gene leads to an increase in SMN protein levels (e.g., by preventing skipping of exon 7, reducing protein degradation). In some embodiments, deaminating the adenosine nucleobase in the SMN2 gene results in correcting a sequence associated with SMA. In some embodiments, deaminating the adenosine nucleobase in the SMN2 gene ameliorates one or more symptoms of SMA.

[0028] It should be appreciated that the foregoing concepts, and additional concepts discussed below, may be arranged in any suitable combination, as the present disclosure is not limited in this respect. Further, other advantages and novel features of the present disclosure will become apparent from the following detailed description of various non-limiting embodiments when considered in conjunction with the accompanying Figures.

### BRIEF DESCRIPTION OF THE DRAWINGS

[0029] The following Figures form part of the present specification and are included to further demonstrate certain aspects of the present disclosure, which can be better understood by reference to one or more of these drawings in combination with the detailed description of specific embodiments presented herein.

[0030] FIG. 1A is a schematic comparing the SMN1 and SMN2 genes and in particular shows the variable splicing pattern associated with the C-to-T mutation in exon 7.

[0031] FIG. 1B is a graph demonstrating A-to-G conversions of adenines at position 1 and position 10 of the CP₁₀₄₁ and split-intein CP₁₀₄₁ (“splitCP1041”) at the SMN2 exon 7 locus. Triplicate transfection experiments in mouse embryonic stem cells (mESCs) derived from the SMA mouse model (Jackson Laboratories, 005025) at the human SMN2 transgene were undertaken.

[0032] FIG. 2A is a graph showing inDelphi predictions of favorable (“good phenotype”) and unfavorable (“bad genotype”) repair outcomes following cutting with an sgRNA described herein (5′-TTTGCAGGAAATGCTGGCAT-3′ (SEQ ID NO: 381)).

[0033] FIG. 2B is a graph showing inDelphi predictions of favorable (“good phenotype”) and unfavorable (“bad genotype”) repair outcomes following cutting with an sgRNA described herein (5′-TTCTCATTTGCAGGAAATGC-3′ (SEQ ID NO: 383)).

[0034] FIG. 2C provides editing outcomes at SMN2 exon 8 of the human SMN2 transgene in SMA mESCs following transfection with 5′-TTTGCAGGAAATGCTGGCAT-3′ (SEQ ID NO: 381) (from FIG. 2A) and Cas9-NG or 5′-TTCTCATTTGCAGGAAATGC-3′ (SEQ ID NO: 383) (from FIG. 2B) and wild-type SpCas9.

[0035] FIG. 3 shows adenine base editing efficiency at the SMN2 C6T in SMA mESCs with ABE7.10 and ABE8e editors using the Cas-protein components indicated on the x-axis. Protospacer position of C6T for each condition is indicated. See Example 3.

[0036] FIG. 4 shows gel electrophoresis image of SMN cDNA PCR amplification spanning exon 6 to exon 8, depicting bands that include or that have skipped exon 7 in pre-mRNA splicing in SMA mESCs treated with the indicated ABE8-fusion base editors. See Example 3.

[0037] FIG. 5A is a schematic representation of SMN exons 6 to 8, and SMN mRNA and protein products. The C>T transition is a master splicing regulator that determines whether the majority of products include (C, SMN1) or skip (T, SMN2) the terminal coding exon 7. Full-length SMN transcripts yield stable FL-SMN protein. Skipped transcripts encode truncated SMNΔ7 proteins that contain a short-peptide chain translated from the 3′-UTR in exon 8 (EMLA (SEQ ID NO: 466)) that signals for protein degradation. The intron 7 splicing silencer ISS-N1, containing two hnRNP A1/A2 domains, is targeted by nusinersen to restore exon 7 inclusion in the majority of SMN2 transcripts.

[0038] FIG. 5B is an illustration of two Cas nuclease strategies to rescue SMN pathology. 1) ISS-N1 editing strategy targeting the 3′ hnRNPA1/A2 domain. Deletions may cause loss of function of the splicing silencer, enhancing inclusion of exon 7 in SMN2 transcripts and production of FL-SMN. 2) Exon 8 editing strategy showing Cas nuclease targeting of the 5′ sequence that encodes the degradation-enhancing EMLA (SEQ ID NO: 466) peptide and stop codons in the majority of SMN2 transcripts. Deletions disrupting the first five codons may result in more stable, modified SMNΔ7 (SMNΔ7mod) proteins.

[0039] FIG. 5C is a table of potential sgRNA and nuclease editor combinations targeting ISS-N1 detailing the cutsite of the DSB, predicted percentage of ‘good’ outcomes among all edits, and relative Cas-protein efficiency at the respective PAM.

[0040] FIG. 5D shows genome editing efficiency at ISS-N1 with the indicated sgRNA and Cas nuclease combinations in SMA mESCs.

[0041] FIG. 5E shows genome editing efficiency at SMN2 exon 8 with the indicated sgRNA and Cas nuclease combinations, including the observed percentage of ‘good’ outcomes among all edits.

[0042] FIG. 5F is a plot depicting SMN protein quantitation relative to Histone H3, following SMN2 exon 8 with the indicated sgRNA and Cas nuclease combinations.

[0043] FIG. 6A is an illustration of an adenine base editing strategy to edit C6T in SMN2, restoring exon 7 splicing inclusion in the majority of transcripts and resulting in upregulation of FL-SMN.

[0044] FIG. 6B is a schematic of a high-throughput genome integrated library of sgRNA: target pairs to enable comprehensive characterization of ABE8e editing outcomes. A library of highly diverse sequences was stably integrated into mESCs using Tol2-transposase followed by hygromycin antibiotic selection. Library cells were targeted with ABE8e and cells were stably selected using blasticidin. Library cassettes were then amplified and analyzed by high-throughput sequencing.

[0045] FIG. 6C shows the ABE8e activity profile. Values reflect percent editing efficiency by indicated protospacer position of the outcome specified at the bottom of each column, relative to maximum editing. The middle column indicates canonical A to G base editing activity. The two leftmost columns indicate other adenine mutation activity. The two rightmost columns indicate other rare mutations. Positions with values ≥30% of maximum are boxed, indicating the ABE8e editing window.

[0046] FIG. 6D shows the sequence motif of canonical A to G ABE8e base editing activity from logistic regression modeling. The sign of each learned weight indicates a contribution above (positive sign) or below (negative sign) the mean activity. Logo opacity is proportional to the Pearson's R or AUC on held-out sequence contexts.

[0047] FIG. 6E shows adenine base editing efficiency at the on-target SMN2 locus and top off-target loci in HEK293T cells by ABE8e-SpyMac paired with sgRNA52 (collectively: ABE8e) transfection. Bars represent editing of the highest edited nucleotide position at each locus, as indicated.

[0048] FIG. 6F is a plot depicting relative quantity of FL-SMN over total SMN transcripts of SMA mESCs following ABE editing, as indicated. Values calculated by automated electrophoresis of RT-PCR products.

[0049] FIG. 6G is a plot depicting SMN protein quantitation relative to Histone H3.

[0050] FIG. 6H is a schematic of split-intein ABE8e-SpyMac and sgRNA52 cassettes as encoded into the dual-AAV vectors, constituting AAV-ABE.

[0051] FIG. 6I is a plot depicting percent SMN2 C6T genome editing, and relative quantity of FL-SMN over total SMN transcripts of SMA mESCs following transfection with AAV-ABE plasmids.

[0052] FIG. 7A is a Kaplan-Meier survival plot of SMA mutant mice with (“A”), and without (“B”) ICV injection of AAV-ABE on P0-P1.

[0053] FIG. 7B shows bodyweight measurements for the indicated SMA mouse cohorts.

[0054] FIG. 7C is a plot depicting percent SMN2 C6T genome editing, and relative quantity of FL-SMN over total SMN transcripts of SMA mESCs following transfection with nusinersen (ASO) and the optimized ABE strategy individually, and in combination.

[0055] FIG. 7D is a Kaplan-Meier survival plot of SMA mutant mice with, and without ICV injection of AAV-ABE on P0-P1 and a single injection of 1 ug ASO on P0.

[0056] FIG. 7E shows bodyweight measurements for the indicated SMA mouse cohorts.

[0057] FIG. 7F is a plot depicting percent SMN2 C6T genome editing in the CNS of treated SMA mice. Bars represent bulk, and GFP positive flow sorted nuclei.

[0058] FIG. 8A is an automated electrophoresis image of SMN2 RT-PCR products of transfected SMA mESCs, as indicated, beside a DNA ladder.

[0059] FIG. 8B is a plot depicting relative quantity of FL-SMN over total SMN transcripts of SMA mESCs following Cas nuclease editing.

[0060] FIGS. 8C-8D show BE-Hive modeling predictions of ABE7.10-CP1041 and ABE7.10-SpCas9 base edited outcomes for SMN2 C6T. Percentages indicate the predicted fraction of a given genotype among edited alleles.

[0061] FIG. 8E shows BE-Hive modeling predictions of ABE7.10-CP1041 and ABE7.10-SpCas9 base editing efficiency at the SMN2 C6T locus.

[0062] FIG. 8F shows CIRCLE-Seq off-target editing outcomes in the human genome of SpyMac nuclease paired with sgRNA52. Mismatches at off-target loci are indicated below the corresponding protospacer position.

[0063] FIG. 8G shows nuclease editing efficiency at the on-target SMN2 locus and top off-target loci in HEK293T cells by SpyMac nuclease paired with sgRNA52 (collectively: Nuclease).

[0064] FIG. 8H shows a time course of exon 7 splicing inclusion in SMN transcripts following nusinersen transfection in SMA mESCs for. Values calculated by automated electrophoresis of RT-PCR products.

### DEFINITIONS

[0065] As used herein and in the claims, the singular forms “a,” “an,” and “the” include the singular and the plural reference unless the context clearly indicates otherwise. Thus, for example, a reference to “an agent” includes a single agent and a plurality of such agents.

### AAV

[0066] An “adeno-associated virus” or “AAV” is a virus which infects humans and some other primate species. The wild-type AAV genome is a single-stranded deoxyribonucleic acid (ssDNA), either positive- or negative-sensed. The genome comprises two inverted terminal repeats (ITRs), one at each end of the DNA strand, and two open reading frames (ORFs): rep and cap between the ITRs. The rep ORF comprises four overlapping genes encoding Rep proteins required for the AAV life cycle. The cap ORF comprises overlapping genes encoding capsid proteins: VP1, VP2 and VP3, which interact together to form the viral capsid. VP1, VP2 and VP3 are translated from one mRNA transcript, which can be spliced in two different manners: either a longer or shorter intron can be excised resulting in the formation of two isoforms of mRNAs: a ˜2.3 kb- and a ˜2.6 kb-long mRNA isoform. The capsid forms a supramolecular assembly of approximately 60 individual capsid protein subunits into a non-enveloped, T-1 icosahedral lattice capable of protecting the AAV genome. The mature capsid is composed of VP1, VP2, and VP3 (molecular masses of approximately 87, 73, and 62 kDa respectively) in a ratio of about 1:1:10.

[0067] rAAV particles may comprise a nucleic acid vector (e.g., a recombinant genome), which may comprise at a minimum: (a) one or more heterologous nucleic acid regions comprising a sequence encoding a protein or polypeptide of interest (e.g., a split Cas9 or split nucleobase) or an RNA of interest (e.g., a gRNA), or one or more nucleic acid regions comprising a sequence encoding a Rep protein; and (b) one or more regions comprising inverted terminal repeat (ITR) sequences (e.g., wild-type ITR sequences or engineered ITR sequences) flanking the one or more nucleic acid regions (e.g., heterologous nucleic acid regions). In some embodiments, the nucleic acid vector is between 4 kb and 5 kb in size (e.g., 4.2 to 4.7 kb in size). In some embodiments, the nucleic acid vector further comprises a region encoding a Rep protein. In some embodiments, the nucleic acid vector is circular. In some embodiments, the nucleic acid vector is single-stranded. In some embodiments, the nucleic acid vector is double-stranded. In some embodiments, a double-stranded nucleic acid vector may be, for example, a self-complimentary vector that contains a region of the nucleic acid vector that is complementary to another region of the nucleic acid vector, initiating the formation of the double-strandedness of the nucleic acid vector.

### Adenosine Deaminase (or Adenine Deaminase)

[0068] As used herein, the term “adenosine deaminase” or “adenosine deaminase domain” refers to a protein or enzyme that catalyzes a deamination reaction of an adenosine (or adenine). The terms “adenosine” and “adenine” are used interchangeably for purposes of the present disclosure. For example, for purposes of the disclosure, reference to an “adenine base editor” (ABE) refers to the same entity as an “adenosine base editor” (ABE). Similarly, for purposes of the disclosure, reference to an “adenine deaminase” refers to the same entity as an “adenosine deaminase.” However, the person having ordinary skill in the art will appreciate that “adenine” refers to the purine base whereas “adenosine” refers to the larger nucleoside molecule that includes the purine base (adenine) and sugar moiety (e.g., either ribose or deoxyribose). In certain embodiments, the disclosure provides base editor fusion proteins comprising one or more adenosine deaminase domains. For instance, an adenosine deaminase domain may comprise a heterodimer of a first adenosine deaminase and a second deaminase domain, connected by a linker. Adenosine deaminases (e.g., engineered adenosine deaminases or evolved adenosine deaminases) provided herein may be enzymes that convert adenine (A) to inosine (I) in DNA or RNA. Such adenosine deaminase can lead to an A:T to G:C base pair conversion. In some embodiments, the deaminase is a variant of a naturally-occurring deaminase from an organism. In some embodiments, the deaminase does not occur in nature. For example, in some embodiments, the deaminase is at least 50%, at least 55%, at least 60%, at least 65%, at least 70%, at least 75% at least 80%, at least 85%, at least 90%, at least 95%, at least 96%, at least 97%, at least 98%, at least 99%, or at least 99.5% identical to a naturally-occurring deaminase.

[0069] In some embodiments, the adenosine deaminase is derived from a bacterium, such as, E. coli, S. aureus, S. typhi, S. putrefaciens, H. influenzae, or C. crescentus. In some embodiments, the adenosine deaminase is a TadA deaminase. In some embodiments, the TadA deaminase is an E. coli TadA deaminase (ecTadA). In some embodiments, the TadA deaminase is a truncated E. coli TadA deaminase. For example, the truncated ecTadA may be missing one or more N-terminal amino acids relative to a full-length ecTadA. In some embodiments, the truncated ecTadA may be missing 1, 2, 3, 4, 5, 6, 7, 8, 9, 10, 11, 12, 13, 14, 15, 6, 17, 18, 19, or 20 N-terminal amino acid residues relative to the full length ecTadA. In some embodiments, the truncated ecTadA may be missing 1, 2, 3, 4, 5, 6, 7, 8, 9, 10, 11, 12, 13, 14, 15, 6, 17, 18, 19, or 20 C-terminal amino acid residues relative to the full length ecTadA. In some embodiments, the ecTadA deaminase does not comprise an N-terminal methionine. Reference is made to U.S. Patent Publication No. 2018/0073012, published Mar. 15, 2018, which is incorporated herein by reference.

### Antisense Strand

[0070] In genetics, the “antisense” strand of a segment within double-stranded DNA is the template strand, and which is considered to run in the 3′ to 5′ orientation. By contrast, the “sense” strand is the segment within double-stranded DNA that runs from 5′ to 3′, and which is complementary to the antisense strand of DNA, or template strand, which runs from 3′ to 5′. In the case of a DNA segment that encodes a protein, the sense strand is the strand of DNA that has the same sequence as the mRNA, which takes the antisense strand as its template during transcription, and eventually undergoes (typically, not always) translation into a protein. The antisense strand is thus responsible for the RNA that is later translated to protein, while the sense strand possesses a nearly identical makeup to that of the mRNA. Note that for each segment of dsDNA, there will possibly be two sets of sense and antisense, depending on which direction one reads (since sense and antisense is relative to perspective). It is ultimately the gene product, or mRNA, that dictates which strand of one segment of dsDNA is referred to as sense or antisense.

### Base Editing

[0071] “Base editing” refers to genome editing technology that involves the conversion of a specific nucleic acid base into another at a targeted genomic locus. In certain embodiments, this can be achieved without requiring double-stranded DNA breaks (DSB), or single stranded breaks (i.e., nicking). To date, other genome editing techniques, including CRISPR-based systems, begin with the introduction of a DSB at a locus of interest. Subsequently, cellular DNA repair enzymes mend the break, commonly resulting in random insertions or deletions (indels) of bases at the site of the DSB. However, when the introduction or correction of a point mutation at a target locus is desired rather than stochastic disruption of the entire gene, these genome editing techniques are unsuitable, as correction rates are low (e.g. typically 0.1% to 5%), with the major genome editing products being indels. In order to increase the efficiency of gene correction without simultaneously introducing random indels, the present inventors previously modified the CRISPR/Cas9 system to directly convert one DNA base into another without DSB formation. See, Komor, A. C., et al., Programmable editing of a target base in genomic DNA without double-stranded DNA cleavage. Nature 533, 420-424 (2016), the entire contents of which is incorporated by reference herein.

### Base Editor

[0072] The term “base editor (BE)” as used herein, refers to an agent comprising a polypeptide that is capable of making a modification to a base (e.g., A, T, C, G, or U) within a nucleic acid sequence (e.g., DNA or RNA) that converts one base to another (e.g., A to G, A to C, A to T, C to T, C to G, C to A, G to A, G to C, G to T, T to A, T to C, T to G). In some embodiments, the base editor is capable of deaminating a base within a nucleic acid such as a base within a DNA molecule. In the case of an adenine base editor, the base editor is capable of deaminating an adenine (A) in DNA. Such base editors may include a nucleic acid programmable DNA binding protein (napDNAbp) fused to an adenosine deaminase. Some base editors include CRISPR-mediated fusion proteins that are utilized in the base editing methods described herein. In some embodiments, the base editor comprises a nuclease-inactive Cas9 (dCas9) fused to a deaminase which binds a nucleic acid in a guide RNA-programmed manner via the formation of an R-loop, but does not cleave the nucleic acid. For example, the dCas9 domain of the fusion protein may include a D10A and a H840A mutation (which renders Cas9 capable of cleaving only one strand of a nucleic acid duplex), as described in PCT/US2016/058344, which published as WO 2017/070632 on Apr. 27, 2017, and is incorporated herein by reference in its entirety. The DNA cleavage domain of S. pyogenes Cas9 includes two subdomains, the HNH nuclease subdomain and the RuvC1 subdomain. The HNH subdomain cleaves the strand complementary to the gRNA (the “targeted strand”, or the strand in which editing or deamination occurs), whereas the RuvC1 subdomain cleaves the non-complementary strand containing the PAM sequence (the “non-edited strand”). The RuvC1 mutant D10A generates a nick in the targeted strand, while the HNH mutant H840A generates a nick on the non-edited strand (see Jinek et al., Science, 337:816-821(2012); Qi et al., Cell. 28; 152(5):1173-83 (2013)).

[0073] In some embodiments, a nucleobase editor is a macromolecule or macromolecular complex that results primarily (e.g., more than 80%, more than 85%, more than 90%, more than 95%, more than 99%, more than 99.9%, or 100%) in the conversion of a nucleobase in a polynucleic acid sequence into another nucleobase (i.e., a transition or transversion) using a combination of 1) a nucleotide-, nucleoside-, or nucleobase-modifying enzyme; and 2) a nucleic acid binding protein that can be programmed to bind to a specific nucleic acid sequence.

[0074] In some embodiments, the nucleobase editor comprises a DNA binding domain (e.g., a programmable DNA binding domain such as a dCas9 or nCas9) that directs it to a target sequence. In some embodiments, the nucleobase editor comprises a nucleobase modifying enzyme fused to a programmable DNA binding domain (e.g., a dCas9 or nCas9). A “nucleobase modifying enzyme” is an enzyme that can modify a nucleobase and convert one nucleobase to another (e.g., a deaminase such as a cytidine deaminase or a adenosine deaminase). In some embodiments, the nucleobase editor may target cytosine (C) bases in a nucleic acid sequence and convert the C to thymine (T) base. In some embodiments, the C to T editing is carried out by a deaminase, e.g., a cytidine deaminase. Base editors that can carry out other types of base conversions (e.g., adenosine (A) to guanine (G), C to G) are also contemplated.

[0075] Nucleobase editors that convert a C to T, in some embodiments, comprise a cytidine deaminase. A “cytidine deaminase” refers to an enzyme that catalyzes the chemical reaction “cytosine+H₂O→uracil+NH₃” or “5-methyl-cytosine+H₂O→thymine+NH₃.” As it may be apparent from the reaction formula, such chemical reactions result in a C to U/T nucleobase change. In the context of a gene, such a nucleotide change, or mutation, may in turn lead to an amino acid change in the protein, which may affect the protein's function, e.g., loss-of-function or gain-of-function. In some embodiments, the C to T nucleobase editor comprises a dCas9 or nCas9 fused to a cytidine deaminase. In some embodiments, the cytidine deaminase domain is fused to the N-terminus of the dCas9 or nCas9. In some embodiments, the nucleobase editor further comprises a domain that inhibits uracil glycosylase, and/or a nuclear localization signal. Such nucleobase editors have been described in the art, e.g., in Rees & Liu, Nat Rev Genet. 2018; 19(12):770-788 and Koblan et al., Nat Biotechnol. 2018; 36(9):843-846; as well as. U.S. Patent Publication No. 2018/0073012, published Mar. 15, 2018, which issued as U.S. Pat. No. 10,113,163; on Oct. 30, 2018; U.S. Patent Publication No. 2017/0121693, published May 4, 2017, which issued as U.S. Pat. No. 10,167,457 on Jan. 1, 2019; International Publication No. WO 2017/070633, published Apr. 27, 2017; U.S. Patent Publication No. 2015/0166980, published Jun. 18, 2015; U.S. Pat. No. 9,840,699, issued Dec. 12, 2017; U.S. Pat. No. 10,077,453, issued Sep. 18, 2018; International Publication No. WO 2019/023680, published Jan. 31, 2019; International Publication No. WO 2018/0176009, published Sep. 27, 2018, International Application No PCT/US2019/033848, filed May 23, 2019, International Application No. PCT/US2019/47996, filed Aug. 23, 2019; International Application No. PCT/US2019/049793, filed Sep. 5, 2019; U.S. Provisional Application No. 62/835,490, filed Apr. 17, 2019; International Application No. PCT/US2019/61685, filed Nov. 15, 2019; International Application No. PCT/US2019/57956, filed Oct. 24, 2019; U.S. Provisional Application No. 62/858,958, filed Jun. 7, 2019; International Publication No. PCT/US2019/58678, filed Oct. 29, 2019, the contents of each of which are incorporated herein by reference in their entireties.

[0076] In some embodiments, a nucleobase editor converts an A to G. In some embodiments, the nucleobase editor comprises an adenosine deaminase. An “adenosine deaminase” is an enzyme involved in purine metabolism. It is needed for the breakdown of adenosine from food and for the turnover of nucleic acids in tissues. Its primary function in humans is the development and maintenance of the immune system. An adenosine deaminase catalyzes hydrolytic deamination of adenosine (forming inosine, which base pairs as G) in the context of DNA. There are no known adenosine deaminases that act on DNA. Instead, known adenosine deaminase enzymes only act on RNA (tRNA or mRNA). Evolved deoxyadenosine deaminase enzymes that accept DNA substrates and deaminate dA to deoxyinosine have been described, e.g., in PCT Application PCT/US2017/045381, filed Aug. 3, 2017, which published as WO 2018/027078, and PCT Application No. PCT/US2019/033848, which published as WO 2019/226953, each of which is herein incorporated by reference by reference.

[0077] Exemplary adenine base editors (ABEs) (or “adenosine base editors”) and cytidine base editors (CBEs) (or “cytosine base editors”) are also described in Rees & Liu, Base editing: precision chemistry on the genome and transcriptome of living cells, Nat. Rev. Genet. 2018; 19(12):770-788; as well as U.S. Patent Publication No. 2018/0073012, published Mar. 15, 2018, which issued as U.S. Pat. No. 10,113,163, on Oct. 30, 2018; U.S. Patent Publication No. 2017/0121693, published May 4, 2017, which issued as U.S. Pat. No. 10,167,457 on Jan. 1, 2019; International Publication No. WO 2017/070633, published Apr. 27, 2017; U.S. Patent Publication No. 2015/0166980, published Jun. 18, 2015; U.S. Pat. No. 9,840,699, issued Dec. 12, 2017; and U.S. Pat. No. 10,077,453, issued Sep. 18, 2018, the contents of each of which are incorporated herein by reference in their entireties.

### Cas9

[0078] The term “Cas9” or “Cas9 nuclease” refers to an RNA-guided nuclease comprising a Cas9 domain, or a fragment thereof (e.g., a protein comprising an active or inactive DNA cleavage domain of Cas9, and/or the gRNA binding domain of Cas9). A “Cas9 domain” as used herein, is a protein fragment comprising an active or inactive cleavage domain of Cas9 and/or the gRNA binding domain of Cas9. A “Cas9 protein” is a full length Cas9 protein. A Cas9 nuclease is also referred to sometimes as a casn1 nuclease or a CRISPR (Clustered Regularly Interspaced Short Palindromic Repeat)-associated nuclease. CRISPR is an adaptive immune system that provides protection against mobile genetic elements (viruses, transposable elements, and conjugative plasmids). CRISPR clusters contain spacers, sequences complementary to antecedent mobile elements, and target invading nucleic acids. CRISPR clusters are transcribed and processed into CRISPR RNA (crRNA). In type II CRISPR systems correct processing of pre-crRNA requires a trans-encoded small RNA (tracrRNA), endogenous ribonuclease 3 (rnc) and a Cas9 domain. The tracrRNA serves as a guide for ribonuclease 3-aided processing of pre-crRNA. Subsequently, Cas9/crRNA/tracrRNA endonucleolytically cleaves a linear or circular dsDNA target complementary to the spacer. The target strand not complementary to crRNA is first cut endonucleolytically, then trimmed 3′-5′ exonucleolytically. In nature, DNA-binding and cleavage typically requires protein and both RNAs. However, single guide RNAs (“sgRNA”, or simply “gNRA”) can be engineered so as to incorporate aspects of both the crRNA and tracrRNA into a single RNA species. See, e.g., Jinek M., Chylinski K., Fonfara I., Hauer M., Doudna J. A., Charpentier E. Science 337:816-821(2012), the entire contents of which are hereby incorporated by reference. Cas9 recognizes a short motif in the CRISPR repeat sequences (the PAM or protospacer adjacent motif) to help distinguish self versus non-self. Cas9 nuclease sequences and structures are well known to those of skill in the art (see, e.g., “Complete genome sequence of an M1 strain of Streptococcus pyogenes.” Ferretti et al., J. J., McShan W. M., Ajdic D. J., Savic D. J., Savic G., Lyon K., Primeaux C., Sezate S., Suvorov A. N., Kenton S., Lai H. S., Lin S. P., Qian Y., Jia H. G., Najar F. Z., Ren Q., Zhu H., Song L., White J., Yuan X., Clifton S. W., Roe B. A., McLaughlin R. E., Proc. Natl. Acad. Sci. U.S.A. 98:4658-4663(2001); “CRISPR RNA maturation by trans-encoded small RNA and host factor RNase III.” Deltcheva E., Chylinski K., Sharma C. M., Gonzales K., Chao Y., Pirzada Z. A., Eckert M. R., Vogel J., Charpentier E., Nature 471:602-607(2011); and “A programmable dual-RNA-guided DNA endonuclease in adaptive bacterial immunity.” Jinek M., Chylinski K., Fonfara I., Hauer M., Doudna J. A., Charpentier E. Science 337:816-821(2012), the entire contents of each of which are incorporated herein by reference). Cas9 orthologs have been described in various species, including, but not limited to, S. pyogenes and S. thermophilus. Additional suitable Cas9 nucleases and sequences will be apparent to those of skill in the art based on this disclosure, and such Cas9 nucleases and sequences include Cas9 sequences from the organisms and loci disclosed in Chylinski, Rhun, and Charpentier, “The tracrRNA and Cas9 families of type II CRISPR-Cas immunity systems” (2013) RNA Biology 10:5, 726-737; the entire contents of which are incorporated herein by reference. In some embodiments, a Cas9 nuclease comprises one or more mutations that partially impair or inactivate the DNA cleavage domain.

[0079] A nuclease-inactivated Cas9 domain may interchangeably be referred to as a “dCas9” protein (for nuclease-“dead” Cas9). Methods for generating a Cas9 domain (or a fragment thereof) having an inactive DNA cleavage domain are known (see, e.g., Jinek et al., Science. 337:816-821(2012); Qi et al., “Repurposing CRISPR as an RNA-Guided Platform for Sequence-Specific Control of Gene Expression” (2013) Cell. 28; 152(5):1173-83, the entire contents of each of which are incorporated herein by reference). For example, the DNA cleavage domain of Cas9 is known to include two subdomains, the HNH nuclease subdomain and the RuvC1 subdomain. The HNH subdomain cleaves the strand complementary to the gRNA, whereas the RuvC1 subdomain cleaves the non-complementary strand. Mutations within these subdomains can silence the nuclease activity of Cas9. For example, the mutations D10A and H840A completely inactivate the nuclease activity of S. pyogenes Cas9 (Jinek et al., Science. 337:816-821(2012); Qi et al., Cell. 28; 152(5):1173-83 (2013)). In some embodiments, proteins comprising fragments of Cas9 are provided. For example, in some embodiments, a protein comprises one of two Cas9 domains: (1) the gRNA binding domain of Cas9; or (2) the DNA cleavage domain of Cas9. In some embodiments, proteins comprising Cas9 or fragments thereof are referred to as “Cas9 variants.” A Cas9 variant shares homology to Cas9, or a fragment thereof. For example, a Cas9 variant is at least about 70% identical, at least about 80% identical, at least about 90% identical, at least about 95% identical, at least about 96% identical, at least about 97% identical, at least about 98% identical, at least about 99% identical, at least about 99.5% identical, at least about 99.8% identical, or at least about 99.9% identical to wild type Cas9 (e.g., SpCas9 of SEQ ID NO: 5). In some embodiments, the Cas9 variant may have 1, 2, 3, 4, 5, 6, 7, 8, 9, 10, 11, 12, 13, 14, 15, 16, 17, 18, 19, 20, 21, 22, 21, 24, 25, 26, 27, 28, 29, 30, 31, 32, 33, 34, 35, 36, 37, 38, 39, 40, 41, 42, 43, 44, 45, 46, 47, 48, 49, 50, or more amino acid changes compared to wild type Cas9 (e.g., SpCas9 of SEQ ID NO: 5). In some embodiments, the Cas9 variant comprises a fragment of Cas9 (e.g., a gRNA binding domain or a DNA-cleavage domain), such that the fragment is at least about 70% identical, at least about 80% identical, at least about 90% identical, at least about 95% identical, at least about 96% identical, at least about 97% identical, at least about 98% identical, at least about 99% identical, at least about 99.5% identical, or at least about 99.9% identical to the corresponding fragment of wild type Cas9 (e.g., SpCas9 of SEQ ID NO: 5). In some embodiments, the fragment is at least 30%, at least 35%, at least 40%, at least 45%, at least 50%, at least 55%, at least 60%, at least 65%, at least 70%, at least 75%, at least 80%, at least 85%, at least 90%, at least 95% identical, at least 96%, at least 97%, at least 98%, at least 99%, or at least 99.5% of the amino acid length of a corresponding wild type Cas9 (e.g., SpCas9 of SEQ ID NO: 5).

[0080] As used herein, the term “nCas9” or “Cas9 nickase” refers to a Cas9 or a variant thereof, which cleaves or nicks only one of the strands of a target cut site thereby introducing a nick in a double strand DNA molecule rather than creating a double strand break. This can be achieved by introducing appropriate mutations in a wild-type Cas9 which inactivates one of the two endonuclease activities of the Cas9. Any suitable mutation which inactivates one Cas9 endonuclease activity but leaves the other intact is contemplated, such as one of D10A or H840A mutations in the wild-type S. pyogenes Cas9 amino acid sequence, or a D10A mutation in the wild-type S. aureus Cas9 amino acid sequence, may be used to form the nCas9.

cDNA

[0081] The term “cDNA” refers to a strand of DNA copied from an RNA template. cDNA is complementary to the RNA template.

### Circular Permutant

[0082] As used herein, the term “circular permutant” refers to a protein or polypeptide (e.g., a Cas9) comprising a circular permutation, which is change in the protein's structural configuration involving a change in order of amino acids appearing in the protein's amino acid sequence. In other words, circular permutants are proteins that have altered N- and C-termini as compared to a wild-type counterpart, e.g., the wild-type C-terminal half of a protein becomes the new N-terminal half. Circular permutation (or CP) is essentially the topological rearrangement of a protein's primary sequence, connecting its N- and C-terminus, often with a peptide linker, while concurrently splitting its sequence at a different position to create new, adjacent N- and C-termini. The result is a protein structure with different connectivity, but which often can have the same overall similar three-dimensional (3D) shape, and possibly include improved or altered characteristics, including, reduced proteolytic susceptibility, improved catalytic activity, altered substrate or ligand binding, and/or improved thermostability. Circular permutant proteins can occur in nature (e.g., concanavalin A and lectin). In addition, circular permutation can occur as a result of posttranslational modifications or may be engineered using recombinant techniques (e.g., see, Oakes et al., “Protein Engineering of Cas9 for enhanced function,” Methods Enzymol, 2014, 546: 491-511 and Oakes et al., “CRISPR-Cas9 Circular Permutants as Programmable Scaffolds for Genome Modification,” Cell, Jan. 10, 2019, 176: 254-267, each of are incorporated herein by reference).

Circularly Permuted napDNAbp

[0083] The term “circularly permuted napDNAbp” refers to any napDNAbp protein, or variant thereof (e.g., SpCas9), that occurs as or engineered as a circular permutant, whereby its N- and C-termini have been topically rearranged. Such circularly permuted proteins (“CP-napDNAbp”, such as “CP-Cas9” in the case of Cas9), or variants thereof, retain the ability to bind DNA when complexed with a guide RNA (gRNA). See, Oakes et al., “Protein Engineering of Cas9 for enhanced function,” Methods Enzymol, 2014, 546: 491-511 and Oakes et al., “CRISPR-Cas9 Circular Permutants as Programmable Scaffolds for Genome Modification,” Cell, Jan. 10, 2019, 176: 254-267, each of are incorporated herein by reference. The instant disclosure contemplates any previously known CP-Cas9 or use a new CP-Cas9 so long as the resulting circularly permuted protein retains the ability to bind DNA when complexed with a guide RNA (gRNA). Exemplary CP-Cas9 proteins are SEQ ID NOs: 64-68.

### Cytidine Deaminase (or Cytosine Deaminase)

[0084] As used herein, the term “cytidine deaminase” or “cytidine deaminase domain” refers to a protein or enzyme that catalyzes a deamination reaction of a cytidine or cytosine. The terms “cytidine” and “cytosine” are used interchangeably for purposes of the present disclosure. For example, for purposes of the disclosure, reference to an “cytidine base editor” (CBE) refers to the same entity as an “cytosine base editor” (CBE). Similarly, for purposes of the disclosure, reference to an “cytidine deaminase” refers to the same entity as an “cytosine deaminase.” However, the person having ordinary skill in the art will appreciate that “cytosine” refers to the pyrimidine base whereas “cytidine” refers to the larger nucleoside molecule that includes the pyrimidine base (cytosine) and sugar moiety (e.g., either ribose or deoxyribose). A cytidine deaminase is encoded by the CDA gene and is an enzyme that catalyzes the removal of an amine group from cytidine (i.e., the base cytosine when attached to a ribose ring, i.e., the nucleoside referred to as cytidine) to uridine (C to U) and deoxycytidine to deoxyuridine (C to U). A non-limiting example of a cytidine deaminase is APOBEC1 (“apolipoprotein B mRNA editing enzyme, catalytic polypeptide 1”). Another example is AID (“activation-induced cytidine deaminase”). Under standard Watson-Crick hydrogen bond pairing, a cytosine base hydrogen bonds to a guanine base. When cytidine is converted to uridine (or deoxycytidine is converted to deoxyuridine), the uridine (or the uracil base of uridine) undergoes hydrogen bond pairing with the base adenine. Thus, a conversion of “C” to uridine (“U”) by cytidine deaminase will cause the insertion of “A” instead of a “G” during cellular repair and/or replication processes. Since the adenine “A” pairs with thymine “T”, the cytidine deaminase in coordination with DNA replication causes the conversion of an C G pairing to a T A pairing in the double-stranded DNA molecule.

### CRISPR

[0085] CRISPR is a family of DNA sequences (i.e., CRISPR clusters) in bacteria and archaea that represent snippets of prior infections by a virus that have invaded the prokaryote. The snippets of DNA are used by the prokaryotic cell to detect and destroy DNA from subsequent attacks by similar viruses and effectively compose, along with an array of CRISPR-associated proteins (including Cas9 and homologs thereof) and CRISPR-associated RNA, a prokaryotic immune defense system. In nature, CRISPR clusters are transcribed and processed into CRISPR RNA (crRNA). In certain types of CRISPR systems (e.g., type II CRISPR systems), correct processing of pre-crRNA requires a trans-encoded small RNA (tracrRNA), endogenous ribonuclease 3 (rnc) and a Cas9 protein. The tracrRNA serves as a guide for ribonuclease 3-aided processing of pre-crRNA. Subsequently, Cas9/crRNA/tracrRNA endonucleolytically cleaves linear or circular dsDNA target complementary to the RNA. Specifically, the target strand not complementary to crRNA is first cut endonucleolytically, then trimmed 3′-5′ exonucleolytically. In nature, DNA-binding and cleavage typically requires protein and both RNAs. However, single guide RNAs (“sgRNA”, or simply “gRNA”) can be engineered so as to incorporate aspects of both the crRNA and tracrRNA into a single RNA species—the guide RNA. See, e.g., Jinek M., Chylinski K., Fonfara I., Hauer M., Doudna J. A., Charpentier E. Science 337:816-821(2012), the entire contents of which is hereby incorporated by reference. Cas9 recognizes a short motif in the CRISPR repeat sequences (the PAM or protospacer adjacent motif) to help distinguish self versus non-self. CRISPR biology, as well as Cas9 nuclease sequences and structures are well known to those of skill in the art (see, e.g., “Complete genome sequence of an M1 strain of Streptococcus pyogenes.” Ferretti et al., J. J., McShan W. M., Ajdic D. J., Savic D. J., Savic G., Lyon K., Primeaux C., Sezate S., Suvorov A. N., Kenton S., Lai H. S., Lin S. P., Qian Y., Jia H. G., Najar F. Z., Ren Q., Zhu H., Song L., White J., Yuan X., Clifton S. W., Roe B. A., McLaughlin R. E., Proc. Natl. Acad. Sci. U.S.A. 98:4658-4663(2001); “CRISPR RNA maturation by trans-encoded small RNA and host factor RNase III.” Deltcheva E., Chylinski K., Sharma C. M., Gonzales K., Chao Y., Pirzada Z. A., Eckert M. R., Vogel J., Charpentier E., Nature 471:602-607(2011); and “A programmable dual-RNA-guided DNA endonuclease in adaptive bacterial immunity.” Jinek M., Chylinski K., Fonfara I., Hauer M., Doudna J. A., Charpentier E. Science 337:816-821(2012), the entire contents of each of which are incorporated herein by reference). Cas9 orthologs have been described in various species, including, but not limited to, S. pyogenes and S. thermophilus. Additional suitable Cas9 nucleases and sequences will be apparent to those of skill in the art based on this disclosure, and such Cas9 nucleases and sequences include Cas9 sequences from the organisms and loci disclosed in Chylinski, Rhun, and Charpentier, “The tracrRNA and Cas9 families of type II CRISPR-Cas immunity systems” (2013) RNA Biology 10:5, 726-737; the entire contents of which are incorporated herein by reference.

[0086] In certain types of CRISPR systems (e.g., type II CRISPR systems), correct processing of pre-crRNA requires a trans-encoded small RNA (tracrRNA), endogenous ribonuclease 3 (rnc), and a Cas9 protein. The tracrRNA serves as a guide for ribonuclease 3-aided processing of pre-crRNA. Subsequently, Cas9/crRNA/tracrRNA endonucleolytically cleaves a linear or circular nucleic acid target complementary to the RNA. Specifically, the target strand not complementary to crRNA is first cut endonucleolytically, then trimmed 3′-5′ exonucleolytically. In nature, DNA-binding and cleavage typically requires protein and both RNAs. However, single guide RNAs (“sgRNA”, or simply “gRNA”) can be engineered to incorporate embodiments of both the crRNA and tracrRNA into a single RNA species—the guide RNA.

[0087] In general, a “CRISPR system” refers collectively to transcripts and other elements involved in the expression of or directing the activity of CRISPR-associated (“Cas”) genes, including sequences encoding a Cas gene, a tracr (trans-activating CRISPR) sequence (e.g. tracrRNA or an active partial tracrRNA), a tracr mate sequence (encompassing a “direct repeat” and a tracrRNA-processed partial direct repeat in the context of an endogenous CRISPR system), a guide sequence (also referred to as a “spacer” in the context of an endogenous CRISPR system), or other sequences and transcripts from a CRISPR locus. The tracrRNA of the system is complementary (fully or partially) to the tracr mate sequence present on the guide RNA.

### Deaminase

[0088] The term “deaminase” or “deaminase domain” refers to a protein or enzyme that catalyzes a deamination reaction. In some embodiments, the deaminase is an adenosine (or adenine) deaminase, which catalyzes the hydrolytic deamination of adenine or adenosine. In some embodiments, the adenosine deaminase catalyzes the hydrolytic deamination of adenine or adenosine in deoxyribonucleic acid (DNA) to inosine. In other embodiments, the deminase is a cytidine (or cytosine) deaminase, which catalyzes the hydrolytic deamination of cytidine or cytosine.

[0089] The deaminases provided herein may be from any organism, such as a bacterium. In some embodiments, the deaminase or deaminase domain is a variant of a naturally-occurring deaminase from an organism. In some embodiments, the deaminase or deaminase domain does not occur in nature. For example, in some embodiments, the deaminase or deaminase domain is at least 50%, at least 55%, at least 60%, at least 65%, at least 70%, at least 75% at least 80%, at least 85%, at least 90%, at least 95%, at least 96%, at least 97%, at least 98%, at least 99%, or at least 99.5% identical to a naturally-occurring deaminase.

### Deron

[0090] The term “degron” or “degron domain” refers to a portion of a polypeptide that influence, controls, directs, or otherwise regulates the rate of degradation of the polypeptide. Degrons can be highly variable and can include short amino acid sequences, structural motifs, and/or exposed amino acids. Also, degrons may be positioned at any location within a polypeptide (e.g., at the N-terminus, the C-terminus, or at an internal position within the primary structure). The particular mechanism of degradation of a polypeptide which is regulated by the degron is not limited and can include ubiquitin-dependent degradation (i.e., degradation that involves proteasomal-based degradation) or ubiquitin-independent degradation. For example, the 4-amino acid sequence tail of NH₃-EMLA (SEQ ID NO: 466) —COOH encoded by exon 8 of the SMN2 gene functions as a degron, triggering degradation of SMN2.

### DNA Binding Protein

[0091] As used herein, the term “DNA binding protein” or “DNA binding protein domain” refers to any protein that localizes to and binds a specific target DNA nucleotide sequence (e.g. a gene locus of a genome). This term embraces RNA-programmable proteins, which associate (e.g. form a complex) with one or more nucleic acid molecules (i.e., which includes, for example, guide RNA in the case of Cas systems) that direct or otherwise program the protein to localize to a specific target nucleotide sequence (e.g., DNA sequence) that is complementary to the one or more nucleic acid molecules (or a portion or region thereof) associated with the protein. Exemplary RNA-programmable proteins are CRISPR-Cas9 proteins, as well as Cas9 equivalents, homologs, orthologs, or paralogs, whether naturally occurring or non-naturally occurring (e.g. engineered or modified), and may include a Cas9 equivalent from any type of CRISPR system (e.g. type II, V, VI), including Cpf1 (a type-V CRISPR-Cas systems), C2c1 (a type V CRISPR-Cas system), C2c2 (a type VI CRISPR-Cas system), C2c3 (a type V CRISPR-Cas system), dCas9, GeoCas9, CjCas9, Cas12a, Cas12b, Cas12c, Cas12d, Cas12g, Cas12h, Cas12i, Cas13d, Cas14, Argonaute, and nCas9. Further Cas-equivalents are described in Makarova et al., “C2c2 is a single-component programmable RNA-guided RNA-targeting CRISPR effector,” Science 2016; 353(6299), the contents of which are incorporated herein by reference.

### DNA Editing Efficiency

[0092] The term “DNA editing efficiency,” as used herein, refers to the number or proportion of intended base pairs that are edited. For example, if a base editor edits 10% of the base pairs that it is intended to target (e.g., within a cell or within a population of cells), then the base editor can be described as being 10% efficient. Some aspects of editing efficiency embrace the modification (e.g. deamination) of a specific nucleotide within DNA, without generating a large number or percentage of insertions or deletions (i.e., indels). It is generally accepted that editing while generating less than 5% indels (as measured over total target nucleotide substrates) is high editing efficiency. The generation of more than 20% indels is generally accepted as poor or low editing efficiency. Indel formation may be measured by techniques known in the art, including high-throughput screening of sequencing reads.

### Downstream

[0093] As used herein, the terms “upstream” and “downstream” are terms of relativity that define the linear position of at least two elements located in a nucleic acid molecule (whether single or double-stranded) that is orientated in a 5′-to-3′ direction. In particular, a first element is upstream of a second element in a nucleic acid molecule where the first element is positioned somewhere that is 5′ to the second element. For example, a SNP is upstream of a Cas9-induced nick site if the SNP is on the 5′ side of the nick site. Conversely, a first element is downstream of a second element in a nucleic acid molecule where the first element is positioned somewhere that is 3′ to the second element. For example, a SNP is downstream of a Cas9-induced nick site if the SNP is on the 3′ side of the nick site. The nucleic acid molecule can be a DNA (double or single stranded). RNA (double or single stranded), or a hybrid of DNA and RNA. The analysis is the same for single strand nucleic acid molecule and a double strand molecule since the terms upstream and downstream are in reference to only a single strand of a nucleic acid molecule, except that one needs to select which strand of the double stranded molecule is being considered. Often, the strand of a double stranded DNA which can be used to determine the positional relativity of at least two elements is the “sense” or “coding” strand. In genetics, a “sense” strand is the segment within double-stranded DNA that runs from 5′ to 3′, and which is complementary to the antisense strand of DNA, or template strand, which runs from 3′ to 5′. Thus, as an example, a SNP nucleobase is “downstream” of a promoter sequence in a genomic DNA (which is double-stranded) if the SNP nucleobase is on the 3′ side of the promoter on the sense or coding strand.

### Effective Amount

[0094] The term “effective amount,” as used herein, refers to an amount of a biologically active agent that is sufficient to elicit a desired biological response. For example, in some embodiments, an effective amount of a base editor may refer to the amount of the editor that is sufficient to edit a target site nucleotide sequence, e.g., a genome. In some embodiments, an effective amount of a base editor provided herein, e.g., of a fusion protein comprising a nickase Cas9 domain and a guide RNA may refer to the amount of the fusion protein that is sufficient to induce editing of a target site specifically bound and edited by the fusion protein. As will be appreciated by the skilled artisan, the effective amount of an agent, e.g., a fusion protein, a nuclease, a hybrid protein, a protein dimer, a complex of a protein (or protein dimer) and a polynucleotide, or a polynucleotide, may vary depending on various factors as, for example, on the desired biological response, e.g., on the specific allele, genome, or target site to be edited, on the cell or tissue being targeted, and on the agent being used.

### Functional Equivalent

[0095] The term “functional equivalent” refers to a second biomolecule that is equivalent in function, but not necessarily equivalent in structure to a first biomolecule. For example, a “Cas9 equivalent” refers to a protein that has the same or substantially the same functions as Cas9, but not necessarily the same amino acid sequence. In the context of the disclosure, the specification refers throughout to “a protein X, or a functional equivalent thereof” In this context, a “functional equivalent” of protein X embraces any homolog, paralog, fragment, naturally occurring, engineered, circular permutant, mutated, or synthetic version of protein X which bears an equivalent function.

### Fusion Protein

[0096] The term “fusion protein” as used herein refers to a hybrid polypeptide which comprises protein domains from at least two different proteins. One protein may be located at the amino-terminal (N-terminal) portion of the fusion protein or at the carboxy-terminal (C-terminal) protein thus forming an “amino-terminal fusion protein” or a “carboxy-terminal fusion protein,” respectively. A protein may comprise different domains, for example, a nucleic acid binding domain (e.g., the gRNA binding domain of Cas9 that directs the binding of the protein to a target site) and a nucleic acid cleavage domain or a catalytic domain of a nucleic-acid editing protein. Another example includes a Cas9 or equivalent thereof fused to an adenosine deaminae. Any of the proteins provided herein may be produced by any method known in the art. For example, the proteins provided herein may be produced via recombinant protein expression and purification, which is especially suited for fusion proteins comprising a peptide linker. Methods for recombinant protein expression and purification are well known, and include those described by Green and Sambrook, Molecular Cloning: A Laboratory Manual (4^{th} ed., Cold Spring Harbor Laboratory Press, Cold Spring Harbor, N.Y. (2012)), the entire contents of which are incorporated herein by reference.

### Guide Nucleic Acid

[0097] The term “guide nucleic acid” or “napDNAbp-programming nucleic acid molecule” or equivalently “guide sequence” refers the one or more nucleic acid molecules which associate with and direct or otherwise program a napDNAbp protein to localize to a specific target nucleotide sequence (e.g., a gene locus of a genome) that is complementary to the one or more nucleic acid molecules (or a portion or region thereof) associated with the protein, thereby causing the napDNAbp protein to bind to the nucleotide sequence at the specific target site. A non-limiting example is a guide RNA of a Cas protein of a CRISPR-Cas genome editing system.

[0098] Guide RNA is a particular type of guide nucleic acid which is mostly commonly associated with a Cas protein of a CRISPR-Cas9 and which associates with Cas9, directing the Cas9 protein to a specific sequence in a DNA molecule that includes complementarity to protospace sequence of the guide RNA. As used herein, a “guide RNA” refers to a synthetic fusion of the endogenous bacterial crRNA and tracrRNA that provides both targeting specificity and scaffolding and/or binding ability for Cas9 nuclease to a target DNA. This synthetic fusion does not exist in nature and is also commonly referred to as an sgRNA. However, this term also embraces the equivalent guide nucleic acid molecules that associate with Cas9 equivalents, homologs, orthologs, or paralogs, whether naturally occurring or non-naturally occurring (e.g., engineered or recombinant), and which otherwise program the Cas9 equivalent to localize to a specific target nucleotide sequence. The Cas9 equivalents may include other napDNAbp from any type of CRISPR system (e.g., type II, V, VI), including Cpf1 (a type-V CRISPR-Cas systems), C2c1 (a type V CRISPR-Cas system), C2c2 (a type VI CRISPR-Cas system) and C2c3 (a type V CRISPR-Cas system). Further Cas-equivalents are described in Makarova et al., “C2c2 is a single-component programmable RNA-guided RNA-targeting CRISPR effector,” Science 2016; 353(6299), the contents of which are incorporated herein by reference. Exemplary sequences are and structures of guide RNAs are provided herein. In addition, methods for designing appropriate guide RNA sequences are provided herein.

Guide RNA (“gRNA”)

[0099] As used herein, the term “guide RNA” is a particular type of guide nucleic acid which is mostly commonly associated with a Cas protein of a CRISPR-Cas9 and which associates with Cas9, directing the Cas9 protein to a specific sequence in a DNA molecule that includes complementarity to protospacer sequence of the guide RNA. However, this term also embraces the equivalent guide nucleic acid molecules that associate with Cas9 equivalents, homologs, orthologs, or paralogs, whether naturally occurring or non-naturally occurring (e.g., engineered or recombinant), and which otherwise program the Cas9 equivalent to localize to a specific target nucleotide sequence. The Cas9 equivalents may include other napDNAbp from any type of CRISPR system (e.g., type II, V, VI), including Cpf1 (a type-V CRISPR-Cas systems), C2c1 (a type V CRISPR-Cas system), C2c2 (a type VI CRISPR-Cas system) and C2c3 (a type V CRISPR-Cas system). Further Cas-equivalents are described in Makarova et al., “C2c2 is a single-component programmable RNA-guided RNA-targeting CRISPR effector,” Science 2016; 353(6299), the contents of which are incorporated herein by reference. Exemplary sequences are and structures of guide RNAs are provided herein.

[0100] Guide RNAs may comprise various structural elements that include, but are not limited to (a) a spacer sequence—the sequence in the guide RNA (having ˜20 nts in length) which binds to a complementary strand of the target DNA (and has the same sequence as the protospacer of the DNA) and (b) a gRNA core (or gRNA scaffold or backbone sequence)—refers to the sequence within the gRNA that is responsible for Cas9 binding, it does not include the ˜20 bp spacer sequence that is used to guide Cas9 to target DNA.

### Guide RNA Target Sequence

[0101] As used herein, the “guide RNA target sequence” refers to the ˜20 nucleotides that are complementary to the protospacer sequence in the PAM strand. The target sequence is the sequence that anneals to or is targeted by the spacer sequence of the guide RNA. The spacer sequence of the guide RNA and the protospacer have the same sequence (except the spacer sequence is RNA and the protospacer is DNA).

### Guide RNA Scaffold Sequence

[0102] As used herein, the “guide RNA scaffold sequence” refers to the sequence within the gRNA that is responsible for Cas9 binding, it does not include the 20 bp spacer/targeting sequence that is used to guide Cas9 to target DNA.

### Host Cell

[0103] The term “host cell,” as used herein, refers to a cell that can host, replicate, and transfer a phage vector useful for a continuous evolution process as provided herein. In embodiments where the vector is a viral vector, a suitable host cell is a cell that may be infected by the viral vector, can replicate it, and can package it into viral particles that can infect fresh host cells. A cell can host a viral vector if it supports expression of genes of viral vector, replication of the viral genome, and/or the generation of viral particles. One criterion to determine whether a cell is a suitable host cell for a given viral vector is to determine whether the cell can support the viral life cycle of a wild-type viral genome that the viral vector is derived from. For example, if the viral vector is a modified M13 phage genome, as provided in some embodiments described herein, then a suitable host cell would be any cell that can support the wild-type M13 phage life cycle. Suitable host cells for viral vectors useful in continuous evolution processes are well known to those of skill in the art, and the disclosure is not limited in this respect. In some embodiments, the viral vector is a phage and the host cell is a bacterial cell. In some embodiments, the host cell is an E. coli cell. Suitable E. coli host strains will be apparent to those of skill in the art, and include, but are not limited to, New England Biolabs (NEB) Turbo, Top10F′, DH12S, ER2738, ER2267, and XL1-Blue MRF′. These strain names are art recognized and the genotype of these strains has been well characterized. It should be understood that the above strains are exemplary only and that the invention is not limited in this respect. The term “fresh,” as used herein interchangeably with the terms “non-infected” or “uninfected” in the context of host cells, refers to a host cell that has not been infected by a viral vector comprising a gene of interest as used in a continuous evolution process provided herein. A fresh host cell can, however, have been infected by a viral vector unrelated to the vector to be evolved or by a vector of the same or a similar type but not carrying the gene of interest.

[0104] In some embodiments, the host cell is a prokaryotic cell, for example, a bacterial cell. In some embodiments, the host cell is an E. coli cell. In some embodiments, the host cell is a eukaryotic cell, for example, a yeast cell, an insect cell, or a mammalian cell. The type of host cell, will, of course, depend on the viral vector employed, and suitable host cell/viral vector combinations will be readily apparent to those of skill in the art.

### Inteins and Split-Inteins

[0105] As used herein, the term “intein” refers to auto-processing polypeptide domains found in organisms from all domains of life. An intein (intervening protein) carries out a unique auto-processing event known as protein splicing in which it excises itself out from a larger precursor polypeptide through the cleavage of two peptide bonds and, in the process, ligates the flanking extein (external protein) sequences through the formation of a new peptide bond. This rearrangement occurs post-translationally (or possibly co-translationally), as intein genes are found embedded in frame within other protein-coding genes. Furthermore, intein-mediated protein splicing is spontaneous; it requires no external factor or energy source, only the folding of the intein domain. This process is also known as cis-protein splicing, as opposed to the natural process of trans-protein splicing with “split inteins.”

[0106] Split inteins are a sub-category of inteins. Unlike the more common contiguous inteins, split inteins are transcribed and translated as two separate polypeptides, the N-intein and C-intein, each fused to one extein. Upon translation, the intein fragments spontaneously and non-covalently assemble into the canonical intein structure to carry out protein splicing in trans.

[0107] Inteins and split inteins are the protein equivalent of the self-splicing RNA introns (see Perler et al., Nucleic Acids Res. 22:1125-1127 (1994)), which catalyze their own excision from a precursor protein with the concomitant fusion of the flanking protein sequences, known as exteins (reviewed in Perler et al., Curr. Opin. Chem. Biol. 1:292-299 (1997); Perler, F. B. Cell 92(1):1-4 (1998); Xu et al., EMBO J. 15(19):5146-5153 (1996)).

[0108] As used herein, the term “protein splicing” refers to a process in which an interior region of a precursor protein (an intein) is excised and the flanking regions of the protein (exteins) are ligated to form the mature protein. This natural process has been observed in numerous proteins from both prokaryotes and eukaryotes (Perler, F. B., Xu, M. Q., Paulus, H. Current Opinion in Chemical Biology 1997, 1, 292-299; Perler, F. B. Nucleic Acids Research 1999, 27, 346-347). The intein unit contains the necessary components needed to catalyze protein splicing and often contains an endonuclease domain that participates in intein mobility (Perler, F. B., Davis, E. O., Dean, G. E., Gimble, F. S., Jack, W. E., Neff, N., Noren, C. J., Thomer, J., Belfort, M. Nucleic Acids Research 1994, 22, 1127-1127). The resulting proteins are linked, however, not expressed as separate proteins. Protein splicing may also be conducted in trans with split inteins expressed on separate polypeptides spontaneously combine to form a single intein which then undergoes the protein splicing process to join to separate proteins.

[0109] The elucidation of the mechanism of protein splicing has led to a number of intein-based applications (Comb, et al., U.S. Pat. No. 5,496,714; Comb, et al., U.S. Pat. No. 5,834,247; Camarero and Muir, J. Amer. Chem. Soc., 121:5597-5598 (1999); Chong, et al., Gene, 192:271-281 (1997), Chong, et al., Nucleic Acids Res., 26:5109-5115 (1998); Chong, et al., J. Biol. Chem., 273:10567-10577 (1998); Cotton, et al. J. Am. Chem. Soc., 121:1100-1101 (1999); Evans, et al., J. Biol. Chem., 274:18359-18363 (1999); Evans, et al., J. Biol. Chem., 274:3923-3926 (1999); Evans, et al., Protein Sci., 7:2256-2264 (1998); Evans, et al., J. Biol. Chem., 275:9091-9094 (2000); Iwai and Pluckthun, FEBS Lett. 459:166-172 (1999); Mathys, et al., Gene, 231:1-13 (1999); Mills, et al., Proc. Natl. Acad. Sci. USA 95:3543-3548 (1998); Muir, et al., Proc. Natl. Acad. Sci. USA 95:6705-6710 (1998); Otomo, et al., Biochemistry 38:16040-16044 (1999); Otomo, et al., J. Biolmol. NMR 14:105-114 (1999); Scott, et al., Proc. Natl. Acad. Sci. USA 96:13638-13643 (1999); Severinov and Muir, J. Biol. Chem., 273:16205-16209 (1998); Shingledecker, et al., Gene, 207:187-195 (1998); Southworth, et al., EMBO J. 17:918-926 (1998); Southworth, et al., Biotechniques, 27:110-120 (1999); Wood, et al., Nat. Biotechnol., 17:889-892 (1999); Wu, et al., Proc. Natl. Acad. Sci. USA 95:9226-9231 (1998a); Wu, et al., Biochim Biophys Acta 1387:422-432 (1998b); Xu, et al., Proc. Natl. Acad. Sci. USA 96:388-393 (1999); Yamazaki, et al., J. Am. Chem. Soc., 120:5591-5592 (1998)). Each reference is incorporated herein by reference.

### Ligand-Dependent Intein

[0110] The term “ligand-dependent intein,” as used herein refers to an intein that comprises a ligand-binding domain. Typically, the ligand-binding domain is inserted into the amino acid sequence of the intein, resulting in a structure intein (N)—ligand-binding domain—intein (C). Typically, ligand-dependent inteins exhibit no or only minimal protein splicing activity in the absence of an appropriate ligand, and a marked increase of protein splicing activity in the presence of the ligand. In some embodiments, the ligand-dependent intein does not exhibit observable splicing activity in the absence of ligand but does exhibit splicing activity in the presence of the ligand. In some embodiments, the ligand-dependent intein exhibits an observable protein splicing activity in the absence of the ligand, and a protein splicing activity in the presence of an appropriate ligand that is at least 5 times, at least 10 times, at least 50 times, at least 100 times, at least 150 times, at least 200 times, at least 250 times, at least 500 times, at least 1000 times, at least 1500 times, at least 2000 times, at least 2500 times, at least 5000 times, at least 10000 times, at least 20000 times, at least 25000 times, at least 50000 times, at least 100000 times, at least 500000 times, or at least 1000000 times greater than the activity observed in the absence of the ligand. In some embodiments, the increase in activity is dose dependent over at least 1 order of magnitude, at least 2 orders of magnitude, at least 3 orders of magnitude, at least 4 orders of magnitude, or at least 5 orders of magnitude, allowing for fine-tuning of intein activity by adjusting the concentration of the ligand. Suitable ligand-dependent inteins are known in the art, and in include those provided below and those described in published U.S. Patent Application U.S. 2014/0065711 A1; Mootz et al., “Protein splicing triggered by a small molecule.” J. Am. Chem. Soc. 2002; 124, 9044-9045; Mootz et al., “Conditional protein splicing: a new tool to control protein structure and function in vitro and in vivo.” J. Am. Chem. Soc. 2003; 125, 10561-10569; Buskirk et al., Proc. Natl. Acad. Sci. USA. 2004; 101, 10505-10510); Skretas & Wood, “Regulation of protein activity with small-molecule-controlled inteins.” Protein Sci. 2005; 14, 523-532; Schwartz, et al., “Post-translational enzyme activation in an animal via optimized conditional protein splicing.” Nat. Chem. Biol. 2007; 3, 50-54; Peck et al., Chem. Biol. 2011; 18 (5), 619-630; the entire contents of each are hereby incorporated by reference. Exemplary sequences are as follows:

| NAME | SEQUENCE OF LIGAND-DEPENDENT INTEIN |
|---|---|
| 2-4 INTEIN: | CLAEGTRIFDPVTGTTHRIEDVVDGRKPIHVVAAAKDGTLLARPVVSWFDQGTRDVIGLRIAGGAIV |
| | WATPDHKVLTEYGWRAAGELRKGDRVAGPGGSGNSLALSLTADQMVSALLDAEPPILYSEYDPTSPF |
| | SEASMMGLLTNLADRELVHMINWAKRVPGFVDLTLHDQAHLLECAWLEILMIGLVWRSMEHPGKLLF |
| | APNLLLDRNQGKCVEGMVEIFDMLLATSSRFRMMNLQGEEFVCLKSIILLNSGVYTFLSSTLKSLEE |
| | KDHIHRALDKITDTLIHLMAKAGLTLQQQHQRLAQLLLILSHIRHMSNKGMEHLYSMKYKNVVPLYD |
| | LLLEMLDAHRLHAGGSGASRVQAFADALDDKFLHDMLAEELRYSVIREVLPTRRARTFDLEVEELHT |
| | LVAEGVVVHNC (SEQ ID NO: 164) |
| 3-2 INTEIN | CLAEGTRIFDPVTGTTHRIEDVVDGRKPIHVVAVAKDGTLLARPVVSWFDQGTRDVIGLRIAGGAIV |
| | WATPDHKVLTEYGWRAAGELRKGDRVAGPGGSGNSLALSLTADQMVSALLDAEPPILYSEYDPTSPF |
| | SEASMMGLLTNLADRELVHMINWAKRVPGFVDLTLHDQAHLLECAWLEILMIGLVWRSMEHPGKLLF |
| | APNLLLDRNQGKCVEGMVEIFDMLLATSSRFRMMNLQGEEFVCLKSIILLNSGVYTFLSSTLKSLEE |
| | KDHIHRALDKITDTLIHLMAKAGLTLQQQHQRLAQLLLILSHIRHMSNKGMEHLYSMKYTNVVPLYD |
| | LLLEMLDAHRLHAGGSGASRVQAFADALDDKFLHDMLAEELRYSVIREVLPTRRARTFDLEVEELHT |
| | LVAEGVVVHNC (SEQ ID NO: 165) |
| 30R3-1 INTEIN | CLAEGTRIFDPVTGTTHRIEDVVDGRKPIHVVAAAKDGTLLARPVVSWFDQGTRDVIGLRIAGGATV |
| | WATPDHKVLTEYGWRAAGELRKGDRVAGPGGSGNSLALSLTADQMVSALLDAEPPIPYSEYDPTSPF |
| | SEASMMGLLTNLADRELVHMINWAKRVPGFVDLTLHDQAHLLECAWLEILMIGLVWRSMEHPGKLLF |
| | APNLLLDRNQGKCVEGMVEIFDMLLATSSRFRMMNLQGEEFVCLKSIILLNSGVYTFLSSTLKSLEE |
| | KDHIHRALDKITDTLIHLMAKAGLTLQQQHQRLAQLLLILSHIRHMSNKGMEHLYSMKYKNVVPLYD |
| | LLLEMLDAHRLHAGGSGASRVQAFADALDDKFLHDMLAEGLRYSVIREVLPTRRARTFDLEVEELHT |
| | LVAEGVVVHNC (SEQ ID NO: 166) |
| 30R3-2 INTEIN | CLAEGTRIFDPVTGTTHRIEDVVDGRKPIHVVAAAKDGTLLARPVVSWFDQGTRDVIGLRIAGGATV |
| | WATPDHKVLTEYGWRAAGELRKGDRVAGPGGSGNSLALSLTADQMVSALLDAEPPILYSEYDPTSPF |
| | SEASMMGLLTNLADRELVHMINWAKRVPGFVDLTLHDQAHLLECAWLEILMIGLVWRSMEHPGKLLF |
| | APNLLLDRNQGKCVEGMVEIFDMLLATSSRFRMMNLQGEEFVCLKSIILLNSGVYTFLSSTLKSLEE |
| | KDHIHRALDKITDTLIHLMAKAGLTLQQQHQRLAQLLLILSHIRHMSNKGMEHLYSMKYKNVVPLYD |
| | LLLEMLDAHRLHAGGSGASRVQAFADALDDKFLHDMLAEELRYSVIREVLPTRRARTFDLEVEELHT |
| | LVAEGVVVHNC (SEQ ID NO: 167) |
| 30R3-3 INTEIN | CLAEGTRIFDPVTGTTHRIEDVVDGRKPIHVVAAAKDGTLLARPVVSWFDQGTRDVIGLRIAGGATV |
| | WATPDHKVLTEYGWRAAGELRKGDRVAGPGGSGNSLALSLTADQMVSALLDAEPPIPYSEYDPTSPF |
| | SEASMMGLLTNLADRELVHMINWAKRVPGFVDLTLHDQAHLLECAWLEILMIGLVWRSMEHPGKLLF |
| | APNLLLDRNQGKCVEGMVEIFDMLLATSSRFRMMNLQGEEFVCLKSIILLNSGVYTFLSSTLKSLEE |
| | KDHIHRALDKITDTLIHLMAKAGLTLQQQHQRLAQLLLILSHIRHMSNKGMEHLYSMKYKNVVPLYD |
| | LLLEMLDAHRLHAGGSGASRVQAFADALDDKFLHDMLAEELRYSVIREVLPTRRARTFDLEVEELHT |
| | LVAEGVVVHNC (SEQ ID NO: 168) |
| 37R3-1 INTEIN | CLAEGTRIFDPVTGTTHRIEDVVDGRKPIHVVAAAKDGTLLARPVVSWFDQGTRDVIGLRIAGGATV |
| | WATPDHKVLTEYGWRAAGELRKGDRVAGPGGSGNSLALSLTADQMVSALLDAEPPILYSEYNPTSPF |
| | SEASMMGLLTNLADRELVHMINWAKRVPGFVDLTLHDQAHLLERAWLEILMIGLVWRSMEHPGKLLF |
| | APNLLLDRNQGKCVEGMVEIFDMLLATSSRFRMMNLQGEEFVCLKSIILLNSGVYTFLSSTLKSLEE |
| | KDHIHRALDKITDTLIHLMAKAGLTLQQQHQRLAQLLLILSHIRHMSNKGMEHLYSMKYKNVVPLYD |
| | LLLEMLDAHRLHAGGSGASRVQAFADALDDKFLHDMLAEGLRYSVIREVLPTRRARTFDLEVEELHT |
| | LVAEGVVVHNC ((SEQ ID NO: 169) |
| 37R3-2 INTEIN | CLAEGTRIFDPVTGTTHRIEDVVDGRKPIHVVAAAKDGTLLARPVVSWFDQGTRDVIGLRIAGGAIV |
| | WATPDHKVLTEYGWRAAGELRKGDRVAGPGGSGNSLALSLTADQMVSALLDAEPPILYSEYDPTSPF |
| | SEASMMGLLTNLADRELVHMINWAKRVPGFVDLTLHDQAHLLERAWLEILMIGLVWRSMEHPGKLLF |
| | APNLLLDRNQGKCVEGMVEIFDMLLATSSRFRMMNLQGEEFVCLKSIILLNSGVYTFLSSTLKSLEE |
| | KDHIHRALDKITDTLIHLMAKAGLTLQQQHQRLAQLLLILSHIRHMSNKGMEHLYSMKYKNVVPLYD |
| | LLLEMLDAHRLHAGGSGASRVQAFADALDDKFLHDMLAEGLRYSVIREVLPTRRARTFDLEVEELHT |
| | LVAEGVVVHNC (SEQ ID NO: 170) |
| 37R3-3 INTEIN | CLAEGTRIFDPVTGTTHRIEDVVDGRKPIHVVAVAKDGTLLARPVVSWFDQGTRDVIGLRIAGGATV |
| | WATPDHKVLTEYGWRAAGELRKGDRVAGPGGSGNSLALSLTADQMVSALLDAEPPILYSEYDPTSPF |
| | SEASMMGLLTNLADRELVHMINWAKRVPGFVDLTLHDQAHLLERAWLEILMIGLVWRSMEHPGKLLF |
| | APNLLLDRNQGKCVEGMVEIFDMLLATSSRFRMMNLQGEEFVCLKSIILLNSGVYTFLSSTLKSLEE |
| | KDHIHRALDKITDTLIHLMAKAGLTLQQQHQRLAQLLLILSHIRHMSNKGMEHLYSMKYKNVVPLYD |
| | LLLEMLDAHRLHAGGSGASRVQAFADALDDKFLHDMLAEELRYSVIREVLPTRRARTFDLEVEELHT |
| | LVAEGVVVHNC (SEQ ID NO: 171) |

### Linker

[0111] The term “linker,” as used herein, refers to a chemical group or a molecule linking two molecules or domains, e.g. dCas9 and a deaminase. Typically, the linker is positioned between, or flanked by, two groups, molecules, or other domains and connected to each one via a covalent bond, thus connecting the two. In some embodiments, the linker is an amino acid or a plurality of amino acids (e.g. a peptide or protein). In some embodiments, the linker is an organic molecule, group, polymer, or chemical domain. Chemical groups include, but are not limited to, disulfide, hydrazone, and azide domains. In some embodiments, the linker is 5-100 amino acids in length, for example, 5, 6, 7, 8, 9, 10, 11, 12, 13, 14, 15, 16, 17, 18, 19, 20, 21, 22, 23, 24, 25, 26, 27, 28, 29, 30, 30-35, 35-40, 40-45, 45-50, 50-60, 60-70, 70-80, 80-90, 90-100, 100-150, or 150-200 amino acids in length. Longer or shorter linkers are also contemplated. In some embodiments, the linker is an XTEN linker. In some embodiments, the linker is a 32-amino acid linker. In other embodiments, the linker is a 30-, 31-, 33- or 34-amino acid linker.

### Mutation

[0112] The term “mutation,” as used herein, refers to a substitution of a residue within a sequence, e.g. a nucleic acid or amino acid sequence, with another residue; a deletion or insertion of one or more residues within a sequence; or a substitution of a residue within a sequence of a genome in a subject to be corrected. Mutations are typically described herein by identifying the original residue followed by the position of the residue within the sequence and by the identity of the newly substituted residue. Various methods for making the amino acid substitutions (mutations) provided herein are well known in the art, and are provided by, for example, Green and Sambrook, Molecular Cloning: A Laboratory Manual (4^{th} ed., Cold Spring Harbor Laboratory Press, Cold Spring Harbor, N.Y. (2012)). Mutations can include a variety of categories, such as single base polymorphisms, microduplication regions, indel, and inversions, and is not meant to be limiting in any way. Mutations can include “loss-of-function” mutations which are mutations that reduce or abolish a protein activity. Most loss-of-function mutations are recessive, because in a heterozygote the second chromosome copy carries an unmutated version of the gene coding for a fully functional protein whose presence compensates for the effect of the mutation. There are some exceptions where a loss-of-function mutation is dominant, one example being haploinsufficiency, where the organism is unable to tolerate the approximately 50% reduction in protein activity suffered by the heterozygote. This is the explanation for a few genetic diseases in humans, including Marfan syndrome, which results from a mutation in the gene for the connective tissue protein called fibrillin. Mutations also embrace “gain-of-function” mutations, which is one which confers an abnormal activity on a protein or cell that is otherwise not present in a normal condition. Many gain-of-function mutations are in regulatory sequences rather than in coding regions, and can therefore have a number of consequences. For example, a mutation might lead to one or more genes being expressed in the wrong tissues, these tissues gaining functions that they normally lack. Alternatively the mutation could lead to overexpression of one or more genes involved in control of the cell cycle, thus leading to uncontrolled cell division and hence to cancer. Because of their nature, gain-of-function mutations are usually dominant.

napDNAbp

[0113] The term “napDNAb” which stand for “nucleic acid programmable DNA binding protein” refers to any protein that may associate (e.g., form a complex) with one or more nucleic acid molecules (i.e., which may broadly be referred to as a “napDNAbp-programming nucleic acid molecule” and includes, for example, guide RNA in the case of Cas systems) which direct or otherwise program the protein to localize to a specific target nucleotide sequence (e.g., a gene locus of a genome) that is complementary to the one or more nucleic acid molecules (or a portion or region thereof) associated with the protein, thereby causing the protein to bind to the nucleotide sequence at the specific target site. This term napDNAbp embraces CRISPR-Cas9 proteins, as well as Cas9 equivalents, homologs, orthologs, or paralogs, whether naturally occurring or non-naturally occurring (e.g., engineered or modified), and may include a Cas9 equivalent from any type of CRISPR system (e.g., type II, V, VI), including Cpf1 (a type-V CRISPR-Cas systems), C2c1 (a type V CRISPR-Cas system), C2c2 (a type VI CRISPR-Cas system), C2c3 (a type V CRISPR-Cas system), dCas9, GeoCas9, CjCas9, Cas12a, Cas12b, Cas12c, Cas12d, Cas12g, Cas12h, Cas12i, Cas13d, Cas14, Argonaute, and nCas9. Further Cas-equivalents are described in Makarova et al., “C2c2 is a single-component programmable RNA-guided RNA-targeting CRISPR effector,” Science 2016; 353 (6299), the contents of which are incorporated herein by reference. However, the nucleic acid programmable DNA binding protein (napDNAbp) that may be used in connection with this invention are not limited to CRISPR-Cas systems. The invention embraces any such programmable protein, such as the Argonaute protein from Natronobacterium gregoryi (NgAgo) which may also be used for DNA-guided genome editing. NgAgo-guide DNA system does not require a PAM sequence or guide RNA molecules, which means genome editing can be performed simply by the expression of generic NgAgo protein and introduction of synthetic oligonucleotides on any genomic sequence. See Gao et al., DNA-guided genome editing using the Natronobacterium gregoryi Argonaute. Nature Biotechnology 2016; 34(7):768-73, which is incorporated herein by reference.

[0114] In some embodiments, the napDNAbp is a RNA-programmable nuclease, when in a complex with an RNA, may be referred to as a nuclease:RNA complex. Typically, the bound RNA(s) is referred to as a guide RNA (gRNA). gRNAs can exist as a complex of two or more RNAs, or as a single RNA molecule. gRNAs that exist as a single RNA molecule may be referred to as single-guide RNAs (sgRNAs), though “gRNA” is used interchangeably to refer to guide RNAs that exist as either single molecules or as a complex of two or more molecules. Typically, gRNAs that exist as single RNA species comprise two domains: (1) a domain that shares homology to a target nucleic acid (e.g., and directs binding of a Cas9 (or equivalent) complex to the target); and (2) a domain that binds a Cas9 protein. In some embodiments, domain (2) corresponds to a sequence known as a tracrRNA, and comprises a stem-loop structure. For example, in some embodiments, domain (2) is homologous to a tracrRNA as depicted in FIG. 1E of Jinek et al., Science 337:816-821(2012), the entire contents of which is incorporated herein by reference. Other examples of gRNAs (e.g., those including domain 2) can be found in U.S. Pat. No. 9,340,799, entitled “mRNA-Sensing Switchable gRNAs,” and International Patent Application No. PCT/US2014/054247, filed Sep. 6, 2013, published as WO 2015/035136 and entitled “Delivery System For Functional Nucleases,” the entire contents of each are herein incorporated by reference. In some embodiments, a gRNA comprises two or more of domains (1) and (2), and may be referred to as an “extended gRNA.” For example, an extended gRNA will, e.g., bind two or more Cas9 proteins and bind a target nucleic acid at two or more distinct regions, as described herein. The gRNA comprises a nucleotide sequence that complements a target site, which mediates binding of the nuclease/RNA complex to said target site, providing the sequence specificity of the nuclease:RNA complex. In some embodiments, the RNA-programmable nuclease is the (CRISPR-associated system) Cas9 endonuclease, for example Cas9 (Csn1) from Streptococcus pyogenes (see, e.g., “Complete genome sequence of an M1 strain of Streptococcus pyogenes.” Ferretti J. J. et al., Proc. Natl. Acad. Sci. U.S.A. 98:4658-4663(2001); “CRISPR RNA maturation by trans-encoded small RNA and host factor RNase III.” Deltcheva E. et al., Nature 471:602-607(2011); and “A programmable dual-RNA-guided DNA endonuclease in adaptive bacterial immunity.” Jinek M. et al., Science 337:816-821(2012), the entire contents of each of which are incorporated herein by reference.

[0115] The napDNAbp nucleases (e.g., Cas9) use RNA:DNA hybridization to target DNA cleavage sites, these proteins are able to be targeted, in principle, to any sequence specified by the guide RNA. Methods of using napDNAbp nucleases, such as Cas9, for site-specific cleavage (e.g., to modify a genome) are known in the art (see e.g., Cong, L. et al. Multiplex genome engineering using CRISPR/Cas systems. Science 339, 819-823 (2013); Mali, P. et al. RNA-guided human genome engineering via Cas9. Science 339, 823-826 (2013); Hwang, W. Y. et al. Efficient genome editing in zebrafish using a CRISPR-Cas system. Nature Biotechnology 31, 227-229 (2013); Jinek, M. et al. RNA-programmed genome editing in human cells. eLife 2, e00471 (2013); Dicarlo, J. E. et al., Genome engineering in Saccharomyces cerevisiae using CRISPR-Cas systems. Nucleic Acid Res. (2013); Jiang, W. et al. RNA-guided editing of bacterial genomes using CRISPR-Cas systems. Nature Biotechnology 31, 233-239 (2013); the entire contents of each of which are incorporated herein by reference).

### Nickase

[0116] The term “nickase” refers to a napDNAbp having only a single nuclease activity (e.g., one of the two nuclease domain is inactivated) that cuts only one strand of a target DNA, rather than both strands. Thus, a nickase type napDNAbp does not leave a double-strand break.

### Nuclear Localization Signal

[0117] A nuclear localization signal or sequence (NLS) is an amino acid sequence that tags, designates, or otherwise marks a protein for import into the cell nucleus by nuclear transport. Typically, this signal consists of one or more short sequences of positively charged lysines or arginines exposed on the protein surface. Different nuclear localized proteins may share the same NLS. An NLS has the opposite function of a nuclear export signal (NES), which targets proteins out of the nucleus. Thus, a single nuclear localization signal can direct the entity with which it is associated to the nucleus of a cell. Such sequences may be of any size and composition, for example more than 25, 25, 15, 12, 10, 8, 7, 6, 5, or 4 amino acids, but will preferably comprise at least a four to eight amino acid sequence known to function as a nuclear localization signal (NLS).

### Nucleic Acid Molecule

[0118] The term “nucleic acid molecule” as used herein, refers to RNA as well as single and/or double-stranded DNA. Nucleic acid molecules may be naturally occurring, for example, in the context of a genome, a transcript, an mRNA, tRNA, rRNA, siRNA, snRNA, a plasmid, cosmid, chromosome, chromatid, or other naturally occurring nucleic acid molecule. On the other hand, a nucleic acid molecule may be a non-naturally occurring molecule, e.g. a recombinant DNA or RNA, an artificial chromosome, an engineered genome, or fragment thereof, or a synthetic DNA, RNA, DNA/RNA hybrid, or including non-naturally occurring nucleotides or nucleosides. Furthermore, the terms “nucleic acid,” “DNA,” “RNA,” and/or similar terms include nucleic acid analogs, e.g. analogs having other than a phosphodiester backbone. Nucleic acids may be purified from natural sources, produced using recombinant expression systems and optionally purified, chemically synthesized, etc. Where appropriate, e.g. in the case of chemically synthesized molecules, nucleic acids may comprise nucleoside analogs such as analogs having chemically modified bases or sugars, and backbone modifications. A nucleic acid sequence is presented in the 5′ to 3′ direction unless otherwise indicated. In some embodiments, a nucleic acid is or comprises natural nucleosides (e.g. adenosine, thymidine, guanosine, cytidine, uridine, deoxyadenosine, deoxythymidine, deoxyguanosine, and deoxycytidine); nucleoside analogs (e.g. 2-aminoadenosine, 2-thiothymidine, inosine, pyrrolo-pyrimidine, 3-methyl adenosine, 5-methylcytidine, 2-aminoadenosine, C5-bromouridine, C5-fluorouridine, C5-iodouridine, C5-propynyl-uridine, C5-propynyl-cytidine, C5-methylcytidine, 2-aminoadenosine, 7-deazaadenosine, 7-deazaguanosine, inosinedenosine, 8-oxoguanosine, O(6)-methylguanine, and 2-thiocytidine); chemically modified bases; biologically modified bases (e.g. methylated bases); intercalated bases; modified sugars (e.g. 2′-fluororibose, ribose, 2′-deoxyribose, arabinose, and hexose); and/or modified phosphate groups (e.g. phosphorothioates and 5′-N-phosphoramidite linkages).

### PACE

[0119] The term “phage-assisted continuous evolution (PACE),” as used herein, refers to continuous evolution that employs phage as viral vectors. The general concept of PACE technology has been described, for example, in International PCT Application, PCT/US2009/056194, filed Sep. 8, 2009, published as WO 2010/028347 on Mar. 11, 2010; International PCT Application, PCT/US2011/066747, filed Dec. 22, 2011, published as WO 2012/088381 on Jun. 28, 2012; U.S. Application, U.S. Pat. No. 9,023,594, issued May 5, 2015, International PCT Application, PCT/US2015/012022, filed Jan. 20, 2015, published as WO 2015/134121 on Sep. 11, 2015, and International PCT Application, PCT/US2016/027795, filed Apr. 15, 2016, published as WO 2016/168631 on Oct. 20, 2016, the entire contents of each of which are incorporated herein by reference.

### Promoter

[0120] The term “promoter” is art-recognized and refers to a nucleic acid molecule with a sequence recognized by the cellular transcription machinery and able to initiate transcription of a downstream gene. A promoter may be constitutively active, meaning that the promoter is always active in a given cellular context, or conditionally active, meaning that the promoter is only active in the presence of a specific condition. For example, a conditional promoter may only be active in the presence of a specific protein that connects a protein associated with a regulatory element in the promoter to the basic transcriptional machinery, or only in the absence of an inhibitory molecule. A subclass of conditionally active promoters is inducible promoters that require the presence of a small molecule “inducer” for activity. Examples of inducible promoters include, but are not limited to, arabinose-inducible promoters, Tet-on promoters, and tamoxifen-inducible promoters. A variety of constitutive, conditional, and inducible promoters are well known to the skilled artisan, and the skilled artisan will be able to ascertain a variety of such promoters useful in carrying out the instant invention, which is not limited in this respect. In various embodiments, the disclosure provides vectors with appropriate promoters for driving expression of the nucleic acid sequences encoding the fusion proteins (or one or more individual components thereof).

### Protein, Peptide, and Polypeptide

[0121] The terms “protein,” “peptide,” and “polypeptide” are used interchangeably herein, and refer to a polymer of amino acid residues linked together by peptide (amide) bonds. The terms refer to a protein, peptide, or polypeptide of any size, structure, or function. Typically, a protein, peptide, or polypeptide will be at least three amino acids long. A protein, peptide, or polypeptide may refer to an individual protein or a collection of proteins. One or more of the amino acids in a protein, peptide, or polypeptide may be modified, for example, by the addition of a chemical entity such as a carbohydrate group, a hydroxyl group, a phosphate group, a farnesyl group, an isofarnesyl group, a fatty acid group, a linker for conjugation, functionalization, or other modification, etc. A protein, peptide, or polypeptide may also be a single molecule or may be a multi-molecular complex. A protein, peptide, or polypeptide may be just a fragment of a naturally occurring protein or peptide. A protein, peptide, or polypeptide may be naturally occurring, recombinant, or synthetic, or any combination thereof. The term “fusion protein” as used herein refers to a hybrid polypeptide which comprises protein domains from at least two different proteins. One protein may be located at the amino-terminal (N-terminal) portion of the fusion protein or at the carboxy-terminal (C-terminal) protein thus forming an “amino-terminal fusion protein” or a “carboxy-terminal fusion protein,” respectively. A protein may comprise different domains, for example, a nucleic acid binding domain (e.g., the gRNA binding domain of Cas9 that directs the binding of the protein to a target site) and a nucleic acid cleavage domain or a catalytic domain of a recombinase. In some embodiments, a protein comprises a proteinaceous part, e.g., an amino acid sequence constituting a nucleic acid binding domain, and an organic compound, e.g., a compound that can act as a nucleic acid cleavage agent. In some embodiments, a protein is in a complex with, or is in association with, a nucleic acid, e.g., RNA. Any of the proteins provided herein may be produced by any method known in the art. For example, the proteins provided herein may be produced via recombinant protein expression and purification, which is especially suited for fusion proteins comprising a peptide linker. Methods for recombinant protein expression and purification are well known, and include those described by Green and Sambrook, Molecular Cloning: A Laboratory Manual (4th ed., Cold Spring Harbor Laboratory Press, Cold Spring Harbor, N.Y. (2012)), the entire contents of which are incorporated herein by reference. It should be appreciated that the disclosure provides any of the polypeptide sequences provided herein without an N-terminal methionine (M) residue.

### Protospacer

[0122] As used herein, the term “protospacer” refers to the sequence (˜20 bp) in DNA adjacent to the PAM (protospacer adjacent motif) sequence. The protospacer shares the same sequence as the spacer sequence of the guide RNA. The guide RNA anneals to the complement of the protospacer sequence on the target DNA (specifically, one strand thereof, i.e., the “target strand” versus the “non-target strand” of the target DNA sequence). In order for Cas9 to function it also requires a specific protospacer adjacent motif (PAM) that varies depending on the bacterial species of the Cas9 gene. The most commonly used Cas9 nuclease, derived from S. pyogenes, recognizes a PAM sequence of NGG that is found directly downstream of the target sequence in the genomic DNA, on the non-target strand. The skilled person will appreciate that the literature in the state of the art sometimes refers to the “protospacer” as the ˜20-nt target-specific guide sequence on the guide RNA itself, rather than referring to it as a “spacer.” Thus, in some cases, the term “protospacer” as used herein may be used interchangeably with the term “spacer.” The context of the description surrounding the appearance of either “protospacer” or “spacer” will help inform the reader as to whether the term is in reference to the gRNA or the DNA target.

### Protospacer Adjacent Motif (PAM)

[0123] As used herein, the term “protospacer adjacent sequence” or “PAM” refers to an approximately 2-6 base pair DNA sequence that is an important targeting component of a Cas9 nuclease. Typically, the PAM sequence is on either strand, and is downstream in the 5′ to 3′ direction of the Cas9 cut site. The canonical PAM sequence (i.e., the PAM sequence that is associated with the Cas9 nuclease of Streptococcus pyogenes or SpCas9) is 5′-NGG-3′ wherein “N” is any nucleobase followed by two guanine (“G”) nucleobases. Different PAM sequences can be associated with different Cas9 nucleases or equivalent proteins from different organisms. In addition, any given Cas9 nuclease, e.g., SpCas9, may be modified to alter the PAM specificity of the nuclease such that the nuclease recognizes alternative PAM sequence.

[0124] For example, with reference to the canonical SpCas9 amino acid sequence is SEQ ID NO: 2, the PAM sequence can be modified by introducing one or more mutations, including (a) D1135V, R1335Q, and T1337R “the VQR variant”, which alters the PAM specificity to NGAN or NGNG, (b) D1135E, R1335Q, and T1337R “the EQR variant”, which alters the PAM specificity to NGAG, and (c) D1135V, G1218R, R1335E, and T1337R “the VRER variant”, which alters the PAM specificity to NGCG. In addition, the D1135E variant of canonical SpCas9 still recognizes NGG, but it is more selective compared to the wild type SpCas9 protein.

[0125] It will also be appreciated that Cas9 enzymes from different bacterial species (i.e., Cas9 orthologs) can have varying PAM specificities. For example, Cas9 from Staphylococcus aureus (SaCas9) recognizes NGRRT or NGRRN. In addition, Cas9 from Neisseria meningitis (NmCas) recognizes NNNNGATT. In another example, Cas9 from Streptococcus thermophilis (StCas9) recognizes NNAGAAW. In still another example, Cas9 from Treponema denticola (TdCas) recognizes NAAAAC. These are examples and are not meant to be limiting. It will be further appreciated that non-SpCas9s bind a variety of PAM sequences, which makes them useful when no suitable SpCas9 PAM sequence is present at the desired target cut site. Furthermore, non-SpCas9s may have other characteristics that make them more useful than SpCas9. For example, Cas9 from Staphylococcus aureus (SaCas9) is about 1 kilobase smaller than SpCas9, so it can be packaged into adeno-associated virus (AAV). Further reference may be made to Shah et al., “Protospacer recognition motifs: mixed identities and functional diversity,” RNA Biology, 10(5): 891-899 (which is incorporated herein by reference).

### RNA-Protein Recruitment System

[0126] In various embodiments, two separate protein domains (e.g., a Cas9 domain and a cytidine deaminase domain) may be colocalized to one another to form a functional complex (akin to the function of a fusion protein comprising the two separate protein domains) by using an “RNA-protein recruitment system,” such as the “MS2 tagging technique.” Such systems generally tag one protein domain with an “RNA-protein interaction domain” (aka “RNA-protein recruitment domain”) and the other with an “RNA-binding protein” that specifically recognizes and binds to the RNA-protein interaction domain, e.g., a specific hairpin structure. These types of systems can be leveraged to colocalize the domains of a base editor, as well as to recruitment additional functionalities to a base editor, such as a UGI domain. In one example, the MS2 tagging technique is based on the natural interaction of the MS2 bacteriophage coat protein (“MCP” or “MS2cp”) with a stem-loop or hairpin structure present in the genome of the phage, i.e., the “MS2 hairpin.” In the case of the MS2 hairpin, it is recognized and bound by the MS2 bacteriophage coat protein (MCP). Thus, in one exemplarily scenario a deaminase-MS2 fusion can recruit a Cas9-MCP fusion.

[0127] A review of other modular RNA-protein interaction domains are described in the art, for example, in Johansson et al., “RNA recognition by the MS2 phage coat protein,” Sem Virol., 1997, Vol. 8(3): 176-185; Delebecque et al., “Organization of intracellular reactions with rationally designed RNA assemblies,” Science, 2011, Vol. 333: 470-474; Mali et al., “Cas9 transcriptional activators for target specificity screening and paired nickases for cooperative genome engineering,” Nat. Biotechnol., 2013, Vol. 31: 833-838; and Zalatan et al., “Engineering complex synthetic transcriptional programs with CRISPR RNA scaffolds,” Cell, 2015, Vol. 160: 339-350, each of which are incorporated herein by reference in their entireties. Other systems include the PP7 hairpin, which specifically recruits the PCP protein, and the “com” hairpin, which specifically recruits the Com protein. See Zalatan et al.

[0128] The nucleotide sequence of the MS2 hairpin (or equivalently referred to as the “MS2 aptamer”) is:

(SEQ ID NO: 172)
GCCAACATGAGGATCACCCATGTCTGCAGGGCC.

[0129] The amino acid sequence of the MCP or MS2cp is:

(SEQ ID NO: 173)
GSASNFTQFVLVDNGGTGDVTVAPSNFANGVAEWISSNSRSQAYKVTCSV
RQSSAQNRKYTIKVEVPKVATQTVGGEELPVAGWRSYLNMELTIPIFATN
SDCELIVKAMQGLLKDGNPIPSAIAANSGIY.

### Sense Strand

[0130] In genetics, a “sense” strand is the segment within double-stranded DNA that runs from 5′ to 3′, and which is complementary to the antisense strand of DNA, or template strand, which runs from 3′ to 5′. In the case of a DNA segment that encodes a protein, the sense strand is the strand of DNA that has the same sequence as the mRNA, which takes the antisense strand as its template during transcription, and eventually undergoes (typically, not always) translation into a protein. The antisense strand is thus responsible for the RNA that is later translated to protein, while the sense strand possesses a nearly identical makeup to that of the mRNA. Note that for each segment of dsDNA, there will possibly be two sets of sense and antisense, depending on which direction one reads (since sense and antisense is relative to perspective). It is ultimately the gene product, or mRNA, that dictates which strand of one segment of dsDNA is referred to as sense or antisense.

[0131] In the context of a PEgRNA, the first step is the synthesis of a single-strand complementary DNA (i.e., the 3′ ssDNA flap, which becomes incorporated) oriented in the 5′ to 3′ direction which is templated off of the PEgRNA extension arm. Whether the 3′ ssDNA flap should be regarded as a sense or antisense strand depends on the direction of transcription since it well accepted that both strands of DNA may serve as a template for transcription (but not at the same time). Thus, in some embodiments, the 3′ ssDNA flap (which overall runs in the the 5′ to 3′ direction) will serve as the sense strand because it is the coding strand. In other embodiments, the 3′ ssDNA flap (which overall runs in the the 5′ to 3′ direction) will serve as the antisense strand and thus, the template for transcription.

### Spacer Sequence

[0132] As used herein, the term “spacer sequence” in connection with a guide RNA refers to the portion of the guide RNA of about 20 nucleotides which contains a nucleotide sequence that is complementary to the protospacer sequence in the target DNA sequence. The spacer sequence anneals to the protospacer sequence to form a ssRNA/ssDNA hybrid structure at the target site and a corresponding R loop ssDNA structure of the endogenous DNA strand that is complementary to the protospacer sequence.

### Subject

[0133] The term “subject,” as used herein, refers to an individual organism, for example, an individual mammal. In some embodiments, the subject is a human. In some embodiments, the subject is a non-human mammal. In some embodiments, the subject is a non-human primate. In some embodiments, the subject is a rodent. In some embodiments, the subject is a sheep, a goat, a cattle, a cat, or a dog. In some embodiments, the subject is a vertebrate, an amphibian, a reptile, a fish, an insect, a fly, or a nematode. In some embodiments, the subject is a research animal. In some embodiments, the subject is genetically engineered, e.g., a genetically engineered non-human subject. The subject may be of either sex and at any stage of development.

### Target Site

[0134] The term “target site” refers to a sequence within a nucleic acid molecule that is edited by a fusion protein (e.g. a dCas9-deaminase fusion protein provided herein). The target site further refers to the sequence within a nucleic acid molecule to which a complex of the fusion protein and gRNA binds.

### Transcription Terminator

[0135] A “transcriptional terminator” is a nucleic acid sequence that causes transcription to stop. A transcriptional terminator may be unidirectional or bidirectional. It is comprised of a DNA sequence involved in specific termination of an RNA transcript by an RNA polymerase. A transcriptional terminator sequence prevents transcriptional activation of downstream nucleic acid sequences by upstream promoters. A transcriptional terminator may be necessary in vivo to achieve desirable expression levels or to avoid transcription of certain sequences. A transcriptional terminator is considered to be “operably linked to” a nucleotide sequence when it is able to terminate the transcription of the sequence it is linked to.

[0136] The most commonly used type of terminator is a forward terminator. When placed downstream of a nucleic acid sequence that is usually transcribed, a forward transcriptional terminator will cause transcription to abort. In some embodiments, bidirectional transcriptional terminators are provided, which usually cause transcription to terminate on both the forward and reverse strand. In some embodiments, reverse transcriptional terminators are provided, which usually terminate transcription on the reverse strand only.

[0137] In prokaryotic systems, terminators usually fall into two categories (1) rho-independent terminators and (2) rho-dependent terminators. Rho-independent terminators are generally composed of palindromic sequence that forms a stem loop rich in G-C base pairs followed by several T bases. Without wishing to be bound by theory, the conventional model of transcriptional termination is that the stem loop causes RNA polymerase to pause, and transcription of the poly-A tail causes the RNA:DNA duplex to unwind and dissociate from RNA polymerase.

[0138] In eukaryotic systems, the terminator region may comprise specific DNA sequences that permit site-specific cleavage of the new transcript so as to expose a polyadenylation site. This signals a specialized endogenous polymerase to add a stretch of about 200 A residues (polyA) to the 3′ end of the transcript. RNA molecules modified with this polyA tail appear to more stable and are translated more efficiently. Thus, in some embodiments involving eukaryotes, a terminator may comprise a signal for the cleavage of the RNA. In some embodiments, the terminator signal promotes polyadenylation of the message. The terminator and/or polyadenylation site elements may serve to enhance output nucleic acid levels and/or to minimize read through between nucleic acids.

[0139] Terminators for use in accordance with the present disclosure include any terminator of transcription described herein or known to one of ordinary skill in the art. Examples of terminators include, without limitation, the termination sequences of genes such as, for example, the bovine growth hormone terminator, and viral termination sequences such as, for example, the SV40 terminator, spy, yejM, secG-leuU, thrLABC, rrnB T1, hisLGDCBHAFI, metZWV, rrnC, xapR, aspA and arcA terminator. In some embodiments, the termination signal may be a sequence that cannot be transcribed or translated, such as those resulting from a sequence truncation.

### Transition

[0140] As used herein, “transitions” refer to the interchange of purine nucleobases (A↔G) or the interchange of pyrimidine nucleobases (C↔T). This class of interchanges involves nucleobases of similar shape. The compositions and methods disclosed herein are capable of inducing one or more transitions in a target DNA molecule. The compositions and methods disclosed herein are also capable of inducing both transitions and transversion in the same target DNA molecule. These changes involve A↔G, G↔A, C↔T, or T↔C. In the context of a double-strand DNA with Watson-Crick paired nucleobases, transversions refer to the following base pair exchanges: A:T↔G:C, G:G↔A:T, C:G↔T:A, or T:A↔C:G. The compositions and methods disclosed herein are capable of inducing one or more transitions in a target DNA molecule. The compositions and methods disclosed herein are also capable of inducing both transitions and transversion in the same target DNA molecule, as well as other nucleotide changes, including deletions and insertions.

### Transversion

[0141] As used herein, “transversions” refer to the interchange of purine nucleobases for pyrimidine nucleobases, or in the reverse and thus, involve the interchange of nucleobases with dissimilar shape. These changes involve T↔A, T↔G, C↔G, C↔A, A↔T, A↔C, G↔C, and G↔T. In the context of a double-strand DNA with Watson-Crick paired nucleobases, transversions refer to the following base pair exchanges: T:A↔A:T, T:A↔G:C, C:G↔G:C, C:G↔A:T, A:T↔T:A, A:T↔C:G, G:C↔C:G, and G:C↔T:A. The compositions and methods disclosed herein are capable of inducing one or more transversions in a target DNA molecule. The compositions and methods disclosed herein are also capable of inducing both transitions and transversion in the same target DNA molecule, as well as other nucleotide changes, including deletions and insertions.

### Treatment

[0142] The terms “treatment,” “treat,” and “treating,” refer to a clinical intervention aimed to reverse, alleviate, delay the onset of, or inhibit the progress of a disease or disorder, or one or more symptoms thereof, as described herein. As used herein, the terms “treatment,” “treat,” and “treating” refer to a clinical intervention aimed to reverse, alleviate, delay the onset of, or inhibit the progress of a disease or disorder, or one or more symptoms thereof, as described herein. In some embodiments, treatment may be administered after one or more symptoms have developed and/or after a disease has been diagnosed. In other embodiments, treatment may be administered in the absence of symptoms, e.g., to prevent or delay onset of a symptom or inhibit onset or progression of a disease. For example, treatment may be administered to a susceptible individual prior to the onset of symptoms (e.g., in light of a history of symptoms and/or in light of genetic or other susceptibility factors). Treatment may also be continued after symptoms have resolved, for example, to prevent or delay their recurrence.

### Upstream

[0143] As used herein, the terms “upstream” and “downstream” are terms of relativity that define the linear position of at least two elements located in a nucleic acid molecule (whether single or double-stranded) that is orientated in a 5′-to-3′ direction. In particular, a first element is upstream of a second element in a nucleic acid molecule where the first element is positioned somewhere that is 5′ to the second element. For example, a SNP is upstream of a Cas9-induced nick site if the SNP is on the 5′ side of the nick site. Conversely, a first element is downstream of a second element in a nucleic acid molecule where the first element is positioned somewhere that is 3′ to the second element. For example, a SNP is downstream of a Cas9-induced nick site if the SNP is on the 3′ side of the nick site. The nucleic acid molecule can be a DNA (double or single stranded). RNA (double or single stranded), or a hybrid of DNA and RNA. The analysis is the same for single strand nucleic acid molecule and a double strand molecule since the terms upstream and downstream are in reference to only a single strand of a nucleic acid molecule, except that one needs to select which strand of the double stranded molecule is being considered. Often, the strand of a double stranded DNA which can be used to determine the positional relativity of at least two elements is the “sense” or “coding” strand. In genetics, a “sense” strand is the segment within double-stranded DNA that runs from 5′ to 3′, and which is complementary to the antisense strand of DNA, or template strand, which runs from 3′ to 5′. Thus, as an example, a SNP nucleobase is “downstream” of a promoter sequence in a genomic DNA (which is double-stranded) if the SNP nucleobase is on the 3′ side of the promoter on the sense or coding strand.

### Uracil Glycosylase Inhibitor

[0144] The term “uracil glycosylase inhibitor” or “UGI,” as used herein, refers to a protein that is capable of inhibiting a uracil-DNA glycosylase base-excision repair enzyme. In some embodiments, a UGI domain comprises a wild-type UGI or a UGI as set forth in SEQ ID NO: 163. In some embodiments, the UGI proteins provided herein include fragments of UGI and proteins homologous to a UGI or a UGI fragment. For example, in some embodiments, a UGI domain comprises a fragment of the amino acid sequence set forth in SEQ ID NO: 163. In some embodiments, a UGI fragment comprises an amino acid sequence that comprises at least 60%, at least 65%, at least 70%, at least 75%, at least 80%, at least 85%, at least 90%, at least 95%, at least 96%, at least 97%, at least 98%, at least 99%, or at least 99.5% of the amino acid sequence as set forth in SEQ ID NO: 163. In some embodiments, a UGI comprises an amino acid sequence homologous to the amino acid sequence set forth in SEQ ID NO: 163, or an amino acid sequence homologous to a fragment of the amino acid sequence set forth in SEQ ID NO: 163. In some embodiments, proteins comprising UGI or fragments of UGI or homologs of UGI or UGI fragments are referred to as “UGI variants.” A UGI variant shares homology to UGI, or a fragment thereof. For example a UGI variant is at least 70% identical, at least 75% identical, at least 80% identical, at least 85% identical, at least 90% identical, at least 95% identical, at least 96% identical, at least 97% identical, at least 98% identical, at least 99% identical, at least 99.5% identical, or at least 99.9% identical to a wild type UGI or a UGI as set forth in SEQ ID NO: 163. In some embodiments, the UGI variant comprises a fragment of UGI, such that the fragment is at least 70% identical, at least 80% identical, at least 90% identical, at least 95% identical, at least 96% identical, at least 97% identical, at least 98% identical, at least 99% identical, at least 99.5% identical, or at least 99.9% to the corresponding fragment of wild-type UGI or a UGI as set forth in SEQ ID NO: 163. In some embodiments, the UGI comprises the following amino acid sequence: MTNLSDIIEKETGKQLVIQESILMLPEEVEEVIGNKPESDILVHTAYDESTDENVMLLT SDAPEYKPWALVIQDSNGENKIKML (SEQ ID NO: 163) (P14739|UNGI_BPPB2 Uracil-DNA glycosylase inhibitor).

### Variant

[0145] As used herein, the term “variant” refers to a protein having characteristics that deviate from what occurs in nature that retains at least one functional i.e. binding, interaction, or enzymatic ability and/or therapeutic property thereof. A “variant” is at least about 70% identical, at least about 80% identical, at least about 90% identical, at least about 95% identical, at least about 96% identical, at least about 97% identical, at least about 98% identical, at least about 99% identical, at least about 99.5% identical, or at least about 99.9% identical to the wild type protein. For instance, a variant of Cas9 may comprise a Cas9 that has one or more changes in amino acid residues as compared to a wild type Cas9 amino acid sequence. As another example, a variant of a deaminase may comprise a deaminase that has one or more changes in amino acid residues as compared to a wild type deaminase amino acid sequence, e.g. following ancestral sequence reconstruction of the deaminase. These changes include chemical modifications, including substitutions of different amino acid residues truncations, covalent additions (e.g. of a tag), and any other mutations. The term also encompasses circular permutants, mutants, truncations, or domains of a reference sequence, and which display the same or substantially the same functional activity or activities as the reference sequence. This term also embraces fragments of a wild type protein.

[0146] The level or degree of which the property is retained may be reduced relative to the wild type protein but is typically the same or similar in kind. Generally, variants are overall very similar, and in many regions, identical to the amino acid sequence of the protein described herein. A skilled artisan will appreciate how to make and use variants that maintain all, or at least some, of a functional ability or property.

[0147] The variant proteins may comprise, or alternatively consist of, an amino acid sequence which is at least 80%, 85%, 90%, 95%, 96%, 97%, 98%, 99%, or 100%, identical to, for example, the amino acid sequence of a wild-type protein, or any protein provided herein (e.g. SMN protein).

[0148] By a polypeptide having an amino acid sequence at least, for example, 95% “identical” to a query amino acid sequence, it is intended that the amino acid sequence of the subject polypeptide is identical to the query sequence except that the subject polypeptide sequence may include up to five amino acid alterations per each 100 amino acids of the query amino acid sequence. In other words, to obtain a polypeptide having an amino acid sequence at least 95% identical to a query amino acid sequence, up to 5% of the amino acid residues in the subject sequence may be inserted, deleted, or substituted with another amino acid. These alterations of the reference sequence may occur at the amino- or carboxy-terminal positions of the reference amino acid sequence or anywhere between those terminal positions, interspersed either individually among residues in the reference sequence or in one or more contiguous groups within the reference sequence.

[0149] As a practical matter, whether any particular polypeptide is at least 80%, 85%, 90%, 95%, 96%, 97%, 98%, or 99% identical to, for instance, the amino acid sequence of a protein such as a SMN protein, can be determined conventionally using known computer programs. A preferred method for determining the best overall match between a query sequence (a sequence of the present invention) and a subject sequence, also referred to as a global sequence alignment, can be determined using the FASTDB computer program based on the algorithm of Brutlag et al. (Comp. App. Biosci. 6:237-245 (1990)). In a sequence alignment the query and subject sequences are either both nucleotide sequences or both amino acid sequences. The result of said global sequence alignment is expressed as percent identity. Preferred parameters used in a FASTDB amino acid alignment are: Matrix=PAM 0, k-tuple=2, Mismatch Penalty=1, Joining Penalty=20, Randomization Group Length=0, Cutoff Score=1, Window Size=sequence length, Gap Penalty=5, Gap Size Penalty=0.05, Window Size=500 or the length of the subject amino acid sequence, whichever is shorter.

[0150] If the subject sequence is shorter than the query sequence due to N- or C-terminal deletions, not because of internal deletions, a manual correction must be made to the results. This is because the FASTDB program does not account for N- and C-terminal truncations of the subject sequence when calculating global percent identity. For subject sequences truncated at the N- and C-termini, relative to the query sequence, the percent identity is corrected by calculating the number of residues of the query sequence that are N- and C-terminal of the subject sequence, which are not matched/aligned with a corresponding subject residue, as a percent of the total bases of the query sequence. Whether a residue is matched/aligned is determined by results of the FASTDB sequence alignment. This percentage is then subtracted from the percent identity, calculated by the above FASTDB program using the specified parameters, to arrive at a final percent identity score. This final percent identity score is what is used for the purposes of the present invention. Only residues to the N- and C-termini of the subject sequence, which are not matched/aligned with the query sequence, are considered for the purposes of manually adjusting the percent identity score. That is, only query residue positions outside the farthest N- and C-terminal residues of the subject sequence.

### Vector

[0151] The term “vector,” as used herein, refers to a nucleic acid that can be modified to encode a gene of interest and that is able to enter into a host cell, mutate and replicate within the host cell, and then transfer a replicated form of the vector into another host cell. Exemplary suitable vectors include viral vectors, such as retroviral vectors or bacteriophages and filamentous phage, and conjugative plasmids. Additional suitable vectors will be apparent to those of skill in the art based on the instant disclosure.

### Wild Type

[0152] As used herein the term “wild type” is a term of the art understood by skilled persons and means the typical form of an organism, strain, gene or characteristic as it occurs in nature as distinguished from mutant or variant forms.

[0153] These and other exemplary substituents are described in more detail in the Detailed Description, Examples, and claims.

### DETAILED DESCRIPTION OF CERTAIN EMBODIMENTS

[0154] The present disclosure provides compositions, fusion proteins, napDNAbps, deaminases (e.g., cytidine or adenine deaminases), guide RNAs, base editors (e.g., CBEs and/or ABEs), nucleic acid molecules, vectors, kits, and methods for modifying a polynucleotide using base editing strategies that comprise the use of a nucleic acid programmable DNA binding protein (“napDNAbp”), a deaminase (e.g., a cytosine or adenine deaminase) and a suitable guide RNA to modify the SMN2 gene such that a stable and functional SMN2 protein is expressed in spinal motor neurons, thereby treating spinal muscular atrophy (SMA). The disclosure relates in part to the inventors' discovery of base editing strategies that may be used to effectively target the SMN2 genomic locus for to install edits that affect SMN protein production and stability, thereby providing a new platform for treating SMA that goes beyond the limitations recognized in the art, such as, antisense oligonucleotide treatments (e.g., nusinersen) which are transient in nature. The methods and composition disclosed herein provide a curative treatment for SMA. Accordingly, the disclosure provides methods, base editors, vectors encoding base editor and cognate gRNAs, and compositions and kits comprise said components, for edits to correct one or more mutations associated with SMA, such as, but not limited to editing C840T of exon 7 of the SMN2 gene, or installing another one or more nucleobase edits which have the effect of removing or inactivating a degron, such as the C-terminal portion of the region encoded by exon 6 or the 4-amino acid region encoded by exon 8 (i.e., the EMLA (SEQ ID NO: 466)-tail) so as to remove or limit their degron activity to reduce, mitigate, or eliminate the intracellular degradation of the SMN2 protein.

[0155] Spinal Muscular Atrophy (SMA) is a progressive motor neuron degeneration disorder that occurs as a result of insufficient survival motor neuron (SMN) protein in spinal motor neurons which leads to atrophy of skeletal muscle and paralysis of the patient. The disease typically involves the status of two SMN-encoding genes, namely, the telomeric SMN1 gene and the almost identical centromeric copy, the SMN2 gene. In SMA, the SMN1 gene is not present due to homozygous deletion (see Cho et al., “A degron created by SMN2 exon 7 skipping is a principle contributor to spinal muscular atrophy severity,” Genes & Development, vol. 24: pp. 438-442, which is incorporated herein by reference). Thus, SMA patients do not typically express SMN1 protein. The centromeric SMN2 gene partially rescues the deleted SMN1 gene but the level of rescue is insufficient because of the presence of a single nucleotide mutation in the splice acceptor site at position 6 within exon 7 that results in the frequent skipping (i.e., ˜80%) of exon 7 during SMN2 post-transcriptional processing (a C-to-T substitution at position 6 of exon 7). Thus, while a small amount of full-size SMN protein is produced from the SMN2 gene, the majority of the SMN2 gene product is truncated in the region corresponding to exon 7. In addition, the defective SMN2 gene product also acquires four amino acids, EMLA (SEQ ID NO: 466), encoded by exon 8 as a new C-terminus of the protein (“the EMLA (SEQ ID NO: 466) tail”). This defective gene product is often referred to as the SMNδ7 product.

[0156] While the SMNδ7 product bears the same function as SMN1, although somewhat diminished, it is rapidly degraded due to the appearance of at least two degron signals formed as a result of the exon-7 skipping event. Specifically, it has been reported that the truncated SMNδ7 product signals its own cellular degradation by the proteasome complex due to the presence of (1) the C-terminal portion of the region encoded by exon 6 and (2) the 4-amino acid region encoded by exon 8 (i.e., the EMLA (SEQ ID NO: 466)-tail), both of which function as degron signals in the absence of the exon 7-encoded region^{8, 9}.

[0157] This disclosure describes the design and use of various exemplary base editors and associated guide RNAs that are capable of installing precise nucleobase changes in the SMN2 genomic locus, thereby resulting in the production of a modified SMN2 protein that avoids or limits its proteasome-dependent degradation and which retains SMN1-compensatory function. For example, the base editors described herein may be used to eliminate and/or modify one or more degrons in the naturally occurring truncated SMNδ7 product to produce a modified SMN2 product having greater stability. For example, such BE-induced modifications can include, but are not limited to, (1) the removal and/or modification of the C-terminal portion of the region encoded by exon 6 and (2) removal and/or modification of the 4-amino acid region encoded by exon 8 (i.e., the EMLA (SEQ ID NO: 466)-tail) so as to remove or limit their degron activity.

[0158] For example, in one embodiment, the genome editing strategies disclosed herein target position 6 of exon 7 of the SMN2 gene locus, which is an inactive splice acceptor site due to the presence of a T in place of a C in exon 7 at that position. This nucleobase position is often referred to as C840T, which is in relation to the counterpart position in the SMN1 gene which presents a C at that position of exon 7, defining an active splice site. Thus, in one embodiment, the genome editing methods and compositions may be used to introduce a T-to-C edit at position 6 of exon 7 of the SMN2 gene, i.e., editing C840T to a C at position 6 of exon 7 and restoring splicing of exon 7, thereby encoding a modified SMN2 protein that includes the amino acid sequence encoded by exon 7. Without wishing to be bound by theory, a modified SMN2 protein comprising the amino acid sequence encoded by exon 7 is not sensitive to cellular degradation, unlike the wild type, truncated SMN2 product formed from the wild type SMN2 gene as a result of exon 7-skipping. The overall activity and/or production of the modified SMN2 protein (i.e., now including the amino acid region encoded by exon 7) are increased, thereby treating SMA. Without being bound by any particular theory, the increased production and/or activity of the modified SMN2 protein relates to the elimination or reduction in protein degradation associated with the truncated SMN2 wild type protein.

[0159] In another embodiment, the genome editing strategies disclosed herein target the removal of one or more degrons present in the encoded SMN2 protein, thereby reducing or eliminating the degron-dependent degradation of the SMN2 protein. For example, the disclosure contemplates the use of genome editing to eliminate the 4-amino acid sequence tail of EMLA (SEQ ID NO: 466) encoded by exon 8 of the SMN2 gene—which functions as a degron—thereby minimizing or eliminating the degradation associated with said degron. In certain aspects, the EMLA (SEQ ID NO: 466) sequence can be removed by using genome editing to remove the exon 8 splice site, such that exon 8 is eliminated from the final messenger RNA, and thus, not encoded into the resulting SMN2 protein.

[0160] In yet another embodiment, the genome editing strategies disclosed herein target the modification of one or more degrons present in the encoded SMN2 protein, thereby reducing or eliminating the degradation associated with said one or more degrons. For example, the disclosure contemplates the use of genome editing to eliminate a stop codon corresponding to the C-terminal end of the region encoded by exon 8 (i.e., which codes for the 4-amino acid sequence tail of EMLA (SEQ ID NO: 466)) such that the 4-amino acid EMLA (SEQ ID NO: 466) tail is lengthened to include additional amino acids, e.g., 5 additional amino acids, which prevents or limits the degradation associated with said EMLA (SEQ ID NO: 466) tail.

[0161] The present disclosure relates in part to the discovery of a variety of base editing strategies to target SMN2 genomic locus for point mutations that affect SMN protein production and stability, which has implications for the treatment of SMA. The disclosure provides methods of correcting the single nucleotide polymorphism (SNP) associated with SMA, as well as methods of increasing the stability and/or decreasing degradation of SMN protein products. For example, in some methods Cas9-nuclease is used to perturb or delete regions of the SMN2 gene to increase protein stability.

[0162] The base editors embrace any type of base editor, and in particular, are exemplified herein using cytidine deaminase base editors (i.e., capable of installing a C-to-T edits, a type of transition editor) and adenine base editors (i.e., capable of installing A-to-G edits, a type of transition editor) to account for a variety of genetic strategies that result in the production of a modified SMN2 protein that is both stable and functional, and which is capable of rescuing the loss of SMN1 function. Such genetic changes are permanent since they are at the level of genomic change, as opposed to a more transient effect of the use of antisense oligonucleotides (ASO) (e.g., nusinersen, approved in the U.S. as SPINRAZA® in 2016), which are only capable of transiently repairing exon 7 splicing in an SMN2 mRNA transcript.

[0163] Aspects of the disclosure provide methods and compositions for deaminating an adenine nucleobase (A) in an SMN2 gene using an adenine base editor (ABE) bound to a guide RNA (gRNA), wherein the gRNA comprises a guide sequence that is complementary to a target nucleic acid sequence in the SNM2 gene.

[0164] Other aspects of the disclosure provide methods and compositions for deaminating a cytosine nucleobase (C) in an SMN2 gene using a cytidine base editor (CBE) bound to a guide RNA (gRNA), wherein the gRNA comprises a guide sequence that is complementary to a target nucleic acid sequence in the SNM2 gene.

[0165] In other aspect, the disclosure relates to the delivery of base editors to cells for modifying the SMN2 gene. Such based editors can be delivered in vivo to a subject. In some embodiments, the fusion protein is delivered in two parts, for example by using a split-intein strategy. In some embodiments, editing of C840T in exon 7 results in an increase, e.g., at least 5%, 10%, 20%, 30%, 40%, 50%, 60%, 70%, 80%, 90%, 95%, 96%, 97%, 98%, 99%, 100% or more increase in a level of SMN protein in a subject, in an organ of a subject (e.g., brain, heart, lungs, liver, intestine, and/or pancreas), or in a cell of a subject (e.g., neuron, such as a motor neuron).

[0166] In still other aspects, the disclosure relates to guide RNAs (gRNA) that direct the base editors to a target SMN2 site. In some embodiments, the gRNA directs the fusion protein in proximity to a point mutation in the SMN2 gene, for example, a point mutation in exon 7. In some embodiments, the gRNA directs the fusion protein within 1, 2, 3, 4, 5, 6, 7, 8, 9, 10, 11, 12, 13, 14, 15, 16, 17, 18, 19, or 20 base pairs of a point mutation within the SMN2 gene. In some embodiments, the gRNA comprises the sequence 5′-ATTTTGTCTAAAACCctgta-3′ (SEQ ID NO: 364), where the nucleotide target is indicated in bold. It should be appreciated that the Ts indicated in the gRNA sequence are uracils (Us) in the RNA sequence. Accordingly, in some embodiments, the gRNA comprises the sequence 5′-AUUUUGUCUAAAACCcugua-3′ (SEQ ID NO: 365). In some embodiments, the guide sequence of the gRNA comprises a nucleic acid sequence selected from the group consisting of 5′-TTTGTCTAAAACCCTGTAAG-3′ (SEQ ID NO: 366), 5′-TTTTGTCTAAAACCCTGTAA-3′ (SEQ ID NO: 368), 5′-TGATTTTGTCTAAAACCC-3′ (SEQ ID NO: 370), 5′-GATTTTGTCTAAAACCCT-3′ (SEQ ID NO: 372), 5′-ATTTTGTCTAAAACCCTG-3′ (SEQ ID NO: 374), 5′-GTCTAAAACCCTGTAAGG-3′ (SEQ ID NO: 376), and 5′-TCTAAAACCCTGTAAGGA-3′ (SEQ ID NO: 378). As noted previously, the gRNA sequence may comprise uracil (U) instead of thymine (T). Therefore, in some embodiments, the guide sequence of the gRNA comprises a nucleic acid sequence selected from the group consisting of 5′-UUUGUCUAAAACCCUGUAAG-3′ (SEQ ID NO: 367), 5′-UUUUGUCUAAAACCCUGUAA-3′ (SEQ ID NO: 369), 5′-UGAUUUUGUCUAAAACCC-3′ (SEQ ID NO: 371), 5′-GAUUUUGUCUAAAACCCU-3′ (SEQ ID NO: 373), 5′-AUUUUGUCUAAAACCCUG-3′ (SEQ ID NO: 375), 5′-GUCUAAAACCCUGUAAGG-3′ (SEQ ID NO: 377), and 5′-UCUAAAACCCUGUAAGGA-3′ (SEQ ID NO: 379).

[0167] In other aspects, the disclosure provides compositions comprising a fusion protein (e.g., adenine base editor or cytidine base editor) and a guide RNA (gRNA). In some embodiments, the gRNA directs the fusion protein in proximity to a stop sequence in the SMN2 gene, for example, in exon 8. In some embodiments, the gRNA directs the fusion protein within 1, 2, 3, 4, 5, 6, 7, 8, 9, 10, 11, 12, 13, 14, 15, 16, 17, 18, 19, or 20 base pairs of stop codon within the SMN2 gene. In some embodiments, the gRNA comprises a nucleic acid sequence selected from the group consisting of: 5′-TTTGCAGGAAATGCTGGCAT-3′ (SEQ ID NO: 381), 5′-TTCTCATTTGCAGGAAATGC-3′ (SEQ ID NO: 383), 5′-CATTTAGTGCTGCTCTATGC-3′ (SEQ ID NO: 385), 5′-CAGGAAATGCTGGCATAGAG-3′ (SEQ ID NO: 387), 5′-TTGCAGGAAATGCTGGCATA-3′ (SEQ ID NO: 389), 5′-ATTTGCAGGAAATGCTGGCA-3′ (SEQ ID NO: 391), and 5′-TGGCATAGAGCAGCACTAAA-3′ (SEQ ID NO: 393), where the nucleotide target is indicated in bold. It should be appreciated that the Ts indicated in the gRNA sequence are uracils (Us) in the RNA sequence. Accordingly, in some embodiments, the gRNA comprises a sequence selected from the group consisting of:

(SEQ ID NO: 324)
5′-UUUGCAGGAAAUGCUGGCAU-3′,
(SEQ ID NO: 325)
5′-UUCUCAUUUGCAGGAAAUGC-3′,
(SEQ ID NO: 326)
5′-CAUUUAGUGCUGCUCUAUGC-3′,
(SEQ ID NO: 327)
5′-CAGGAAAUGCUGGCAUAGAG-3′,
(SEQ ID NO: 328)
5′-UUGCAGGAAAUGCUGGCAUA-3′,
(SEQ ID NO: 329)
5′-AUUUGCAGGAAAUGCUGGCA-3′,
and
(SEQ ID NO: 394)
5′-UGGCAUAGAGCAGCACUAAA-3′.

[0168] In some embodiments, the gRNA directs the fusion protein in proximity to a specific codon sequence in the SMN2 gene, for example, in exon 6. In one embodiment, the gRNA directs the fusion protein in proximity to the S270 amino acid of SMN2. In some embodiments, the gRNA directs the fusion protein within 1, 2, 3, 4, 5, 6, 7, 8, 9, 10, 11, 12, 13, 14, 15, 16, 17, 18, 19, or 20 base pairs of a specific codon within the SMN2 gene. In some embodiments, the gRNA comprises the nucleic acid sequence 5′-TGGCATAGAGCAGCACTAAA-3′ (SEQ ID NO: 353), where the nucleotide target is indicated in bold. It should be appreciated that the Ts indicated in the gRNA sequence are uracils (Us) in the RNA sequence. Accordingly, in some embodiments, the gRNA comprises the sequence: 5′-UGGCAUAGAGCAGCACUAAA-3′ (SEQ ID NO: 394).

[0169] In some embodiments, the disclosure provides guide sequences capable of directing base editors (e.g., adenosine base editors) to the fifth stop codon of exon 8 in an SMN2 gene. In some embodiments, the disclosure provides guide sequences capable of directing base editors (e.g., adenosine base editors) to the AGT codon encoding S270 (in exon 6) of the SMN2 gene. In some aspects the disclosure provides proteins that deaminate the nucleobase adenine, for example in an SMN2 gene to treat SMA.

[0170] In some embodiments, the base editor nicks the target sequence that is complementary to the guide sequence. In some embodiments, the base editor is a circular permutant (CP) adenine base editor, such as the CP₁₀₄₁ base editor. In some embodiments, the base editor may be formulated as a split-intein base editor. The base editor may be, for example, wild-type SpCas9, SaCas9-KKH, Cas9-VQR, Cas9-VRQR, Cas9-VRER, Cas9-NG, CP1028, CP1041, CP1041-NG, Cpf1, iSpyMac, SpCas9-NRRH, or SpCas9-NRCH.

[0171] Methods and compositions provided herein, in some embodiments, are used to treat a subject having or a subject suspected of having SMA.

[0172] Thus, in some aspects, the base editor and guide RNA complexes described herein may be useful for treating a disease or a disorder caused by a C to T mutation in a SMN2 gene. In some embodiments, deaminating the adenosine nucleobase in the SMN2 gene results in a T-A base pair in the SMN2 gene being mutated to a C-G base pair in the SMN2 gene. In some embodiments, deaminating the adenosine nucleobase in the SMN2 gene leads to an increase in SMN protein. In some embodiments, deaminating the adenosine nucleobase in the SMN2 gene results in correcting a sequence associated with SMA. In some embodiments, deaminating the adenosine nucleobase in the SMN2 gene ameliorates one or more symptoms of SMA.

[0173] In some embodiments, the SMN2 is centromeric survival of motor neuron 2 from Homo sapiens. For example, Gene ID: 6607, which may also be referred to as SMNC, BCD541, GEMIN1, TDRD16B, or C-BCD541. See, for example, NG_008728.1 RefSeqGene.

### I. SMN Sequences

[0174] In various aspects, the disclosure references the SMN1 gene and the SMN2 genes, with the SMN2 gene being targeted for editing by the base editor constructs and compositions described herein. The full-length human SMN1 and SMN2 proteins and their nucleotide sequences are provided below, in Table 1.

TABLE 1
The nucleotide and amino acid sequences of SMN1 and SMN2 in humans.

| | | SEQ ID |
|---|---|---|
| Description | Sequence | NO: |
| SMN1 survival of | CCACAAATGTGGGAGGGCGATAACCACTCGTAGAAAGCGTGAGAAGTTACTAC | 1 |
| motor neuron 1, | AAGCGGTCCTCCCGGCCACCGTACTGTTCCGCTCCCAGAAGCCCCGGGCGGCG | |
| telomeric [Homo | GAAGTCGTCACTCTTAAGAAGGGACGGGGCCCCACGCTGCGCACCCGCGGGTT | |
| sapiens (human)] | TGCTATGGCGATGAGCAGCGGCGGCAGTGGTGGCGGCGTCCCGGAGCAGGAGG | |
| | ATTCCGTGCTGTTCCGGCGCGGCACAGGCCAGAGCGATGATTCTGACATTTGG | |
| | GATGATACAGCACTGATAAAAGCATATGATAAAGCTGTGGCTTCATTTAAGCA | |
| | TGCTCTAAAGAATGGTGACATTTGTGAAACTTCGGGTAAACCAAAAACCACAC | |
| | CTAAAAGAAAACCTGCTAAGAAGAATAAAAGCCAAAAGAAGAATACTGCAGCT | |
| | TCCTTACAACAGTGGAAAGTTGGGGACAAATGTTCTGCCATTTGGTCAGAAGA | |
| | CGGTTGCATTTACCCAGCTACCATTGCTTCAATTGATTTTAAGAGAGAAACCT | |
| | GTGTTGTGGTTTACACTGGATATGGAAATAGAGAGGAGCAAAATCTGTCCGAT | |
| | CTACTTTCCCCAATCTGTGAAGTAGCTAATAATATAGAACAAAATGCTCAAGA | |
| | GAATGAAAATGAAAGCCAAGTTTCAACAGATGAAAGTGAGAACTCCAGGTCTC | |
| | CTGGAAATAAATCAGATAACATCAAGCCCAAATCTGCTCCATGGAACTCTTTT | |
| | CTCCCTCCACCACCCCCCATGCCAGGGCCAAGACTGGGACCAGGAAAGCCAGG | |
| | TCTAAAATTCAATGGCCCACCACCGCCACCGCCACCACCACCACCCCACTTAC | |
| | TATCATGCTGGCTGCCTCCATTTCCTTCTGGACCACCAATAATTCCCCCACCA | |
| | CCTCCCATATGTCCAGATTCTCTTGATGATGCTGATGCTTTGGGAAGTATGTT | |
| | AATTTCATGGTACATGAGTGGCTATCATACTGGCTATTATATGGAAATGCTGG | |
| | CATAGAGCAGCACTAAATGACACCACTAAAGAAACGATCAGACAGATCTGGAA | |
| | TGTGAAGCGTTATAGAAGATAACTGGCCTCATTTCTTCAAAATATCAAGTGTT | |
| | GGGAAAGAAAAAAGGAAGTGGAATGGGTAACTCTTCTTGATTAAAAGTTATGT | |
| | AATAACCAAATGCAATGTGAAATATTTTACTGGACTCTATTTTGAAAAACCAT | |
| | CTGTAAAAGACTGGGGTGGGGGTGGGAGGCCAGCACGGTGGTGAGGCAGTTGA | |
| | GAAAATTTGAATGTGGATTAGATTTTGAATGATATTGGATAATTATTGGTAAT | |
| | TTTATGAGCTGTGAGAAGGGTGTTGTAGTTTATAAAAGACTGTCTTAATTTGC | |
| | ATACTTAAGCATTTAGGAATGAAGTGTTAGAGTGTCTTAAAATGTTTCAAATG | |
| | GTTTAACAAAATGTATGTGAGGCGTATGTGGCAAAATGTTACAGAATCTAACT | |
| | GGTGGACATGGCTGTTCATTGTACTGTTTTTTTCTATCTTCTATATGTTTAAA | |
| | AGTATATAATAAAAATATTTAATTTTTTTTTAAA | |
| SMN1 survival of | MAMSSGGSGGGVPEQEDSVLFRRGTGQSDDSDIWDDTALIKAYDKAVASFKHA | 2 |
| motor neuron 1, | LKNGDICETSGKPKTTPKRKPAKKNKSQKKNTAASLQQWKVGDKCSAIWSEDG | |
| telomeric [Homo | CIYPATIASIDFKRETCVVVYTGYGNREEQNLSDLLSPICEVANNIEQNAQEN | |
| sapiens (human)] | ENESQVSTDESENSRSPGNKSDNIKPKSAPWNSFLPPPPPMPGPRLGPGKPGL | |
| | KFNGPPPPPPPPPPHLLSCWLPPFPSGPPIIPPPPPICPDSLDDADALGSMLI | |
| | SWYMSGYHTGYYMGFRQNQKEGRCSHSLN | |
| SMN2 survival of | GCACCCGCGGGTTTGCTATGGCGATGAGCAGCGGCGGCAGTGGTGGCGGCGTC | 3 |
| motor neuron 1, | CCGGAGCAGGAGGATTCCGTGCTGTTCCGGCGCGGCACAGGCCAGAGCGATGA | |
| telomeric [Homo | TTCTGACATTTGGGATGATACAGCACTGATAAAAGCATATGATAAAGCTGTGG | |
| sapiens (human)] | CTTCATTTAAGCATGCTCTAAAGAATGGTGACATTTGTGAAACTTCGGGTA | |
| | AACCAAAAACCACACCTAAAAGAAAACCTGCTAAGAAGAATAAAAGCCAAAAG | |
| | AAGAATACTGCAGCTTCCTTACAACAGTGGAAAGTTGGGGACAAATGTTCTGC | |
| | CATTTGGTCAGAAGACGGTTGCATTTACCCAGCTACCATTGCTTCAATTGATT | |
| | TTAAGAGAGAAACCTGTGTTGTGGTTTACACTGGATATGGAAATAGAGAGGAG | |
| | CAAAATCTGTCCGATCTACTTTCCCCAATCTGTGAAGTAGCTAATAATATAGA | |
| | ACAAAATGCTCAAGAGAATGAAAATGAAAGCCAAGTTTCAACAGATGAAAGTG | |
| | AGAACTCCAGGTCTCCTGGAAATAAATCAGATAACATCAAGCCCAAATCTGCT | |
| | CCATGGAACTCTTTTCTCCCTCCACCACCCCCCATGCCAGGGCCAAGACTGGG | |
| | ACCAGGAAAGCCAGGTCTAAAATTCAATGGCCCACCACCGCCACCGCCACCAC | |
| | CACCACCCCACTTACTATCATGCTGGCTGCCTCCATTTCCTTCTGGACCACCA | |
| | ATAATTCCCCCACCACCTCCCATATGTCCAGATTCTCTTGATGATGCTGATGC | |
| | TTTGGGAAGTATGTTAATTTCATGGTACATGAGTGGCTATCATACTGGCTATT | |
| | ATATGGAAATGCTGGCATAGAGCAGCACTAAATGACACCACTAAAGAAACGAT | |
| | CAGACAGATCTGGAATGTGAAGCGTTATAGAAGATAACTGGCCTCATTTCTTC | |
| | AAAATATCAAGTGTTGGGAAAGAAAAAAGGAAGTGGAATGGGTAACTCTTCTT | |
| | GATTAAAAGTTATGTAATAACCAAATGCAATGTGAAATATTTTACTGGACTCT | |
| | ATTTTGAAAAACCATCTGTAAAAGACTGAGGTGGGGGTGGGAGGCCAGCACGG | |
| | TGGTGAGGCAGTTGAGAAAATTTGAATGTGGATTAGATTTTGAATGATATTGG | |
| | ATAATTATTGGTAATTTTATGAGCTGTGAGAAGGGTGTTGTAGTTTATAAAAG | |
| | ACTGTCTTAATTTGCATACTTAAGCATTTAGGAATGAAGTGTTAGAGTGTCTT | |
| | AAAATGTTTCAAATGGTTTAACAAAATGTATGTGAGGCGTATGTGGCAAAATG | |
| | TTACAGAATCTAACTGGTGGACATGGCTGTTCATTGTACTGTTTTTTTCTATC | |
| | TTCTATATGTTTAAAAGTATATAATAAAAATATTTAATTTTTTTTTAAATTA | |
| SMN2 survival of | MAMSSGGSGGGVPEQEDSVLFRRGTGQSDDSDIWDDTALIKAYDKAVASFKHA | 4 |
| motor neuron 1, | LKNGDICETSGKPKTTPKRKPAKKNKSQKKNTAASLQQWKVGDKCSAIWSEDG | |
| telomeric [Homo | CIYPATIASIDFKRETCVWYTGYGNREEQNLSDLLSPICEVANNIEQNAQEN | |
| sapiens (human)] | ENESQVSTDESENSRSPGNKSDNIKPKSAPWNSFLPPPPPMPGPRLGPGKPGL | |
| | KFNGPPPPPPPPPPHLLSCWLPPFPSGPPIIPPPPPICPDSLDDADALGSMLI | |
| | SWYMSGYHTGYYMEM | |
| | LA | |

II. napDNAbp (Cas9 Domains)

[0175] In one aspect, the methods and base editor compositions described herein involve a nucleic acid programmable DNA binding protein (napDNAbp). Each napDNAbp is associated with at least one guide nucleic acid (e.g., guide RNA), which localizes the napDNAbp to a DNA sequence that comprises a DNA strand (i.e., a target strand) that is complementary to the guide nucleic acid, or a portion thereof (e.g., the spacer of a guide RNA that anneals to the protospacer of the DNA target). In other words, the guide nucleic-acid “programs” the napDNAbp (e.g., Cas9 or equivalent) to localize and bind to a complementary sequence of the protospacer in the DNA. In various embodiments, the napDNAbp can be fused to a herein disclosed adenosine deaminase or cytidine deaminase. In some embodiments, a napDNAbp (e.g., Cas9) can be used in the methods described herein to induce formation of an indel in SMN2, preventing exon skipping.

[0176] Any suitable napDNAbp may be used in the methods and base editor compositions described herein. In various embodiments, the napDNAbp may be any Class 2 CRISPR-Cas system, including any type II, type V, or type VI CRISPR-Cas enzyme. Given the rapid development of CRISPR-Cas as a tool for genome editing, there have been constant developments in the nomenclature used to describe and/or identify CRISPR-Cas enzymes, such as Cas9 and Cas9 orthologs. This application references CRISPR-Cas enzymes with nomenclature that may be old and/or new. The skilled person will be able to identify the specific CRISPR-Cas enzyme being referenced in this Application based on the nomenclature that is used, whether it is old (i.e., “legacy”) or new nomenclature. CRISPR-Cas nomenclature is extensively discussed in Makarova et al., “Classification and Nomenclature of CRISPR-Cas Systems: Where from Here?,” The CRISPR Journal, Vol. 1. No. 5, 2018, the entire contents of which are incorporated herein by reference. The particular CRISPR-Cas nomenclature used in any given instance in this Application is not limiting in any way and the skilled person will be able to identify which CRISPR-Cas enzyme is being referenced.

[0177] For example, the following type II, type V, and type VI Class 2 CRISPR-Cas enzymes have the following art-recognized old (i.e., legacy) and new names. Each of these enzymes, and/or variants thereof, may be used with the methods and base editor compositions described herein:

| | |
|---|---|
| Legacy nomenclature | Current nomenclature* |

type II CRISPR-Cas enzymes

| | |
|---|---|
| Cas9 | same |

type V CRISPR-Cas enzymes

| | |
|---|---|
| Cpf1 | Cas12a |
| CasX | Cas12e |
| C2c1 | Cas12b1 |
| Cas12b2 | same |
| C2c3 | Cas12c |
| CasY | Cas12d |
| C2c4 | same |
| C2c8 | same |
| C2c5 | same |
| C2c10 | same |
| C2c9 | same |

type VI CRISPR-Cas enzymes

| | |
|---|---|
| C2c2 | Cas13a |
| Cas13d | same |
| C2c7 | Cas13c |
| C2c6 | Cas13b |

*See Makarova et al., The CRISPR Journal, Vol. 1, No. 5, 2018

[0178] Without being bound by any particular theory, the binding mechanism of certain napDNAbps contemplated herein includes the step of forming an R-loop whereby the napDNAbp induces the unwinding of a double-strand DNA target, thereby separating the strands in the region bound by the napDNAbp. The guide RNA spacer then hybridizes to the target strand at the protospacer sequence. This displaces a “non-target strand” that is complementary to the target strand, which forms the single strand region of the R-loop. In some embodiments, the napDNAbp includes one or more nuclease activities, which then cut the DNA leaving various types of lesions. For example, the napDNAbp may comprises a nuclease activity that cuts the non-target strand at a first location, and/or cuts the target strand at a second location. Depending on the nuclease activity, the target DNA can be cut to form a “double-stranded break” whereby both strands are cut. In other embodiments, the target DNA can be cut at only a single site, i.e., the DNA is “nicked” on one strand. Exemplary napDNAbp with different nuclease activities include “Cas9 nickase” (“nCas9”) and a deactivated Cas9 having no nuclease activities (“dead Cas9” or “dCas9”).

[0179] The below description of various napDNAbps which can be used in connection with the presently disclose base editors is not meant to be limiting in any way. The base editors may comprise the canonical SpCas9, or any ortholog Cas9 protein, or any variant Cas9 protein—including any naturally occurring variant, mutant, or otherwise engineered version of Cas9—that is known or which can be made or evolved through a directed evolutionary or otherwise mutagenic process. In various embodiments, the Cas9 or Cas9 variants have a nickase activity, i.e., only cleave one strand of the target DNA sequence. In other embodiments, the Cas9 or Cas9 variants have inactive nucleases, i.e., are “dead” Cas9 proteins. Other variant Cas9 proteins that may be used are those having a smaller molecular weight than the canonical SpCas9 (e.g., for easier delivery) or having modified or rearranged primary amino acid structure (e.g., the circular permutant formats).

[0180] The base editors described herein may also comprise Cas9 equivalents, including Cas12a (Cpf1) and Cas12b1 proteins which are the result of convergent evolution. The napDNAbps used herein (e.g., SpCas9, Cas9 variant, or Cas9 equivalents) may also may also contain various modifications that alter/enhance their PAM specifities. Lastly, the application contemplates any Cas9, Cas9 variant, or Cas9 equivalent which has at least 70%, at least 75%, at least 80%, at least 85%, at least 90%, at least 91%, at least 92%, at least 93%, at least 94%, at least 95%, at least 96%, at least 97%, at least 98%, at least 99%, or at least 99.9% sequence identity to a reference Cas9 sequence, such as a reference SpCas9 canonical sequence or a reference Cas9 equivalent (e.g., Cas12a (Cpf1)).

[0181] The napDNAbp can be a CRISPR (clustered regularly interspaced short palindromic repeat)-associated nuclease. As outlined above, CRISPR is an adaptive immune system that provides protection against mobile genetic elements (viruses, transposable elements and conjugative plasmids). CRISPR clusters contain spacers, sequences complementary to antecedent mobile elements, and target invading nucleic acids. CRISPR clusters are transcribed and processed into CRISPR RNA (crRNA). In type II CRISPR systems correct processing of pre-crRNA requires a trans-encoded small RNA (tracrRNA), endogenous ribonuclease 3 (rnc) and a Cas9 protein. The tracrRNA serves as a guide for ribonuclease 3-aided processing of pre-crRNA. Subsequently, Cas9/crRNA/tracrRNA endonucleolytically cleaves linear or circular dsDNA target complementary to the spacer. The target strand not complementary to crRNA is first cut endonucleolytically, then trimmed 3′-5′ exonucleolytically. In nature, DNA-binding and cleavage typically requires protein and both RNAs. However, single guide RNAs (“sgRNA”, or simply “gRNA”) can be engineered so as to incorporate aspects of both the crRNA and tracrRNA into a single RNA species. See, e.g., Jinek M. et al., Science 337:816-821(2012), the entire contents of which is hereby incorporated by reference.

[0182] In some embodiments, the napDNAbp directs cleavage of one or both strands at the location of a target sequence, such as within the target sequence and/or within the complement of the target sequence. In some embodiments, the napDNAbp directs cleavage of one or both strands within about 1, 2, 3, 4, 5, 6, 7, 8, 9, 10, 15, 20, 25, 50, 100, 200, 500, or more base pairs from the first or last nucleotide of a target sequence. In some embodiments, a vector encodes a napDNAbp that is mutated to with respect to a corresponding wild-type enzyme such that the mutated napDNAbp lacks the ability to cleave one or both strands of a target polynucleotide containing a target sequence. For example, an aspartate-to-alanine substitution (D10A) in the RuvC I catalytic domain of Cas9 from S. pyogenes converts Cas9 from a nuclease that cleaves both strands to a nickase (cleaves a single strand). Other examples of mutations that render Cas9 a nickase include, without limitation, H840A, N854A, and N863A in reference to the canonical SpCas9 sequence, or to equivalent amino acid positions in other Cas9 variants or Cas9 equivalents.

[0183] As used herein, the term “Cas protein” refers to a full-length Cas protein obtained from nature, a recombinant Cas protein having a sequences that differs from a naturally occurring Cas protein, or any fragment of a Cas protein that nevertheless retains all or a significant amount of the requisite basic functions needed for the disclosed methods, i.e., (i) possession of nucleic-acid programmable binding of the Cas protein to a target DNA, and (ii) ability to nick the target DNA sequence on one strand. The Cas proteins contemplated herein embrace CRISPR Cas 9 proteins, as well as Cas9 equivalents, variants (e.g., Cas9 nickase (nCas9) or nuclease inactive Cas9 (dCas9)) homologs, orthologs, or paralogs, whether naturally occurring or non-naturally occurring (e.g., engineered or recombinant), and may include a Cas9 equivalent from any Class 2 CRISPR system (e.g., type II, V, VI), including Cas12a (Cpf1), Cas12e (CasX), Cas12b1 (C2c1), Cas12b2, Cas12c (C2c3), C2c4, C2c8, C2c5, C2c10, C2c9 Cas13a (C2c2), Cas13d, Cas13c (C2c7), Cas13b (C2c6), and Cas13b. Further Cas-equivalents are described in Makarova et al., “C2c2 is a single-component programmable RNA-guided RNA-targeting CRISPR effector,” Science 2016; 353(6299) and Makarove et al., “Classification and Nomenclature of CRISPR-Cas Systems: Where from Here?,” The CRISPR Journal, Vol. 1 No. 5, 2018, the contents of which are incorporated herein by reference.

[0184] The terms “Cas9” or “Cas9 nuclease” or “Cas9 moiety” or “Cas9 domain” embrace any naturally occurring Cas9 from any organism, any naturally-occurring Cas9 equivalent or functional fragment thereof, any Cas9 homolog, ortholog, or paralog from any organism, and any mutant or variant of a Cas9, naturally-occurring or engineered. The term Cas9 is not meant to be particularly limiting and may be referred to as a “Cas9 or equivalent.” Exemplary Cas9 proteins are further described herein and/or are described in the art and are incorporated herein by reference. The present disclosure is unlimited with regard to the particular Cas9 that is employed in the base editor (PE) of the invention.

[0185] As noted herein, Cas9 nuclease sequences and structures are well known to those of skill in the art (see, e.g., “Complete genome sequence of an M1 strain of Streptococcus pyogenes.” Ferretti et al., J. J., McShan W. M., Ajdic D. J., Savic D. J., Savic G., Lyon K., Primeaux C., Sezate S., Suvorov A. N., Kenton S., Lai H. S., Lin S. P., Qian Y., Jia H. G., Najar F. Z., Ren Q., Zhu H., Song L., White J., Yuan X., Clifton S. W., Roe B. A., McLaughlin R. E., Proc. Natl. Acad. Sci. U.S.A. 98:4658-4663(2001); “CRISPR RNA maturation by trans-encoded small RNA and host factor RNase III.” Deltcheva E., Chylinski K., Sharma C. M., Gonzales K., Chao Y., Pirzada Z. A., Eckert M. R., Vogel J., Charpentier E., Nature 471:602-607(2011); and “A programmable dual-RNA-guided DNA endonuclease in adaptive bacterial immunity.” Jinek M., Chylinski K., Fonfara I., Hauer M., Doudna J. A., Charpentier E. Science 337:816-821(2012), the entire contents of each of which are incorporated herein by reference).

[0186] Examples of Cas9 and Cas9 equivalents are provided as follows; however, these specific examples are not meant to be limiting. The base editor fusions of the present disclosure may use any suitable napDNAbp, including any suitable Cas9 or Cas9 equivalent.

### (1) Wild Type Canonical SpCas9

[0187] In one embodiment, the base editor constructs described herein may comprise the “canonical SpCas9” nuclease from S. pyogenes, which has been widely used as a tool for genome engineering and is categorized as the type II subgroup of enzyme of the Class 2 CRISPR-Cas systems. This Cas9 protein is a large, multi-domain protein containing two distinct nuclease domains. Point mutations can be introduced into Cas9 to abolish one or both nuclease activities, resulting in a nickase Cas9 (nCas9) or dead Cas9 (dCas9), respectively, that still retains its ability to bind DNA in a sgRNA-programmed manner. In principle, when fused to another protein or domain, Cas9 or a variant thereof (e.g., nCas9) can target that protein to virtually any DNA sequence simply by co-expression with an appropriate sgRNA. As used herein, the canonical SpCas9 protein refers to the wild type protein from Streptococcus pyogenes having the following amino acid sequence:

| Description | Sequence | SEQ ID NO: |
|---|---|---|
| SpCas 9 | MDKKYSIGLDIGTNSVGWAVITDEYKVPSKKFKVLGNTDRHSIKKNLIGALLFDS | 5 |
| Streptococcus | GETAEATRLKRTARRRYTRRKNRICYLQEIFSNEMAKVDDSFFHRLEESFLVEED | |
| pyogenes | KKHERHPIFGNIVDEVAYHEKYPTIYHLRKKLVDSTDKADLRLIYLALAHMIKFR | |
| M1 | GHFLIEGDLNPDNSDVDKLFIQLVQTYNQLFEENPINASGVDAKAILSARLSKSR | |
| SwissProt | RLENLIAQLPGEKKNGLFGNLIALSLGLTPNFKSNFDLAEDAKLQLSKDTYDDDL | |
| Accession | DNLLAQIGDQYADLFLAAKNLSDAILLSDILRVNTEITKAPLSASMIKRYDEHHQ | |
| No. Q99ZW2 | DLTLLKALVRQQLPEKYKEIFFDQSKNGYAGYIDGGASQEEFYKFIKPILEKMDG | |
| Wild type | TEELLVKLNREDLLRKQRTFDNGSIPHQIHLGELHAILRRQEDFYPFLKDNREKI | |
| | EKILTFRIPYYVGPLARGNSRFAWMTRKSEETITPWNFEEWDKGASAQSFIERM | |
| | TNFDKNLPNEKVLPKHSLLYEYFTVYNELTKVKYVTEGMRKPAFLSGEQKKAIVD | |
| | LLFKTNRKVTVKQLKEDYFKKIECFDSVEISGVEDRFNASLGTYHDLLKIIKDKD | |
| | FLDNEENEDILEDIVLTLTLFEDREMIEERLKTYAHLFDDKVMKQLKRRRYTGWG | |
| | RLSRKLINGIRDKQSGKTILDFLKSDGFANRNFMQLIHDDSLTFKEDIQKAQVSG | |
| | QGDSLHEHIANLAGSPAIKKGILQTVKWDELVKVMGRHKPENIVIEMARENQTT | |
| | QKGQKNSRERMKRIEEGIKELGSQILKEHPVENTQLQNEKLYLYYLQNGRDMYVD | |
| | QELDINRLSDYDVDHIVPQSFLKDDSIDNKVLTRSDKNRGKSDNVPSEEVVKKMK | |
| | NYWRQLLNAKLITQRKFDNLTKAERGGLSELDKAGFIKRQLVETRQITKHVAQIL | |
| | DSRMNTKYDENDKLIREVKVITLKSKLVSDFRKDFQFYKVREINNYHHAHDAYLN | |
| | AVVGTALIKKYPKLESEFVYGDYKVYDVRKMIAKSEQEIGKATAKYFFYSNIMNF | |
| | FKTEITLANGEIRKRPLIETNGETGEIVWDKGRDFATVRKVLSMPQVNIVKKTEV | |
| | QTGGFSKESILPKRNSDKLIARKKDWDPKKYGGFDSPTVAYSVLWAKVEKGKSK | |
| | KLKSVKELLGITIMERSSFEKNPIDFLEAKGYKEVKKDLIIKLPKYSLFELENGR | |
| | KRMLASAGELQKGNELALPSKYVNFLYLASHYEKLKGSPEDNEQKQLFVEQHKHY | |
| | LDEIIEQISEFSKRVILADANLDKVLSAYNKHRDKPIREQAENIIHLFTLTNLGA | |
| | PAAFKYFDTTIDRKRYTSTKEVLDATLIHQSITGLYETRIDLSQLGGD | |
| SpCas 9 | ATGGATAAAAAATATAGCATTGGCCTGGATATTGGCACCAACAGCGTGGGCTGGG | 6 |
| Reverse | CGGTGATTACCGATGAATATAAAGTGCCGAGCAAAAAATTTAAAGTGCTGGGCAA | |
| translation | CACCGATCGCCATAGCATTAAAAAAAACCTGATTGGCGCGCTGCTGTTTGATAGC | |
| of | GGCGAAACCGCGGAAGCGACCCGCCTGAAACGCACCGCGCGCCGCCGCTATACCC | |
| SwissProt | GCCGCAAAAACCGCATTTGCTATCTGCAGGAAATTTTTAGCAACGAAATGGCGAA | |
| Accession | AGTGGATGATAGCTTTTTTCATCGCCTGGAAGAAAGCTTTCTGGTGGAAGAAGAT | |
| No. Q99ZW2 | AAAAAACATGAACGCCATCCGATTTTTGGCAACATTGTGGATGAAGTGGCGTATC | |
| Streptococcus | ATGAAAAATATCCGACCATTTATCATCTGCGCAAAAAACTGGTGGATAGCACCGA | |
| pyogenes | TAAAGCGGATCTGCGCCTGATTTATCTGGCGCTGGCGCATATGATTAAATTTCGC | |
| | GGCCATTTTCTGATTGAAGGCGATCTGAACCCGGATAACAGCGATGTGGATAAAC | |
| | TGTTTATTCAGCTGGTGCAGACCTATAACCAGCTGTTTGAAGAAAACCCGATTAA | |
| | CGCGAGCGGCGTGGATGCGAAAGCGATTCTGAGCGCGCGCCTGAGCAAAAGCCGC | |
| | CGCCTGGAAAACCTGATTGCGCAGCTGCCGGGCGAAAAAAAAAACGGCCTGTTTG | |
| | GCAACCTGATTGCGCTGAGCCTGGGCCTGACCCCGAACTTTAAAAGCAACTTTGA | |
| | TCTGGCGGAAGATGCGAAACTGCAGCTGAGCAAAGATACCTATGATGATGATCTG | |
| | GATAACCTGCTGGCGCAGATTGGCGATCAGTATGCGGATCTGTTTCTGGCGGCGA | |
| | AAAACCTGAGCGATGCGATTCTGCTGAGCGATATTCTGCGCGTGAACACCGAAAT | |
| | TACCAAAGCGCCGCTGAGCGCGAGCATGATTAAACGCTATGATGAACATCATCAG | |
| | GATCTGACCCTGCTGAAAGCGCTGGTGCGCCAGCAGCTGCCGGAAAAATATAAAG | |
| | AAATTTTTTTTGATCAGAGCAAAAACGGCTATGCGGGCTATATTGATGGCGGCGC | |
| | GAGCCAGGAAGAATTTTATAAATTTATTAAACCGATTCTGGAAAAAATGGATGGC | |
| | ACCGAAGAACTGCTGGTGAAACTGAACCGCGAAGATCTGCTGCGCAAACAGCGCA | |
| | CCTTTGATAACGGCAGCATTCCGCATCAGATTCATCTGGGCGAACTGCATGCGAT | |
| | TCTGCGCCGCCAGGAAGATTTTTATCCGTTTCTGAAAGATAACCGCGAAAAAATT | |
| | GAAAAAATTCTGACCTTTCGCATTCCGTATTATGTGGGCCCGCTGGCGCGCGGCA | |
| | ACAGCCGCTTTGCGTGGATGACCCGCAAAAGCGAAGAAACCATTACCCCGTGGAA | |
| | CTTTGAAGAAGTGGTGGATAAAGGCGCGAGCGCGCAGAGCTTTATTGAACGCATG | |
| | ACCAACTTTGATAAAAACCTGCCGAACGAAAAAGTGCTGCCGAAACATAGCCTGC | |
| | TGTATGAATATTTTACCGTGTATAACGAACTGACCAAAGTGAAATATGTGACCGA | |
| | AGGCATGCGCAAACCGGCGTTTCTGAGCGGCGAACAGAAAAAAGCGATTGTGGAT | |
| | CTGCTGTTTAAAACCAACCGCAAAGTGACCGTGAAACAGCTGAAAGAAGATTATT | |
| | TTAAAAAAATTGAATGCTTTGATAGCGTGGAAATTAGCGGCGTGGAAGATCGCTT | |
| | TAACGCGAGCCTGGGCACCTATCATGATCTGCTGAAAATTATTAAAGATAAAGAT | |
| | TTTCTGGATAACGAAGAAAACGAAGATATTCTGGAAGATATTGTGCTGACCCTGA | |
| | CCCTGTTTGAAGATCGCGAAATGATTGAAGAACGCCTGAAAACCTATGCGCATCT | |
| | GTTTGATGATAAAGTGATGAAACAGCTGAAACGCCGCCGCTATACCGGCTGGGGC | |
| | CGCCTGAGCCGCAAACTGATTAACGGCATTCGCGATAAACAGAGCGGCAAAACCA | |
| | TTCTGGATTTTCTGAAAAGCGATGGCTTTGCGAACCGCAACTTTATGCAGCTGAT | |
| | TCATGATGATAGCCTGACCTTTAAAGAAGATATTCAGAAAGCGCAGGTGAGCGGC | |
| | CAGGGCGATAGCCTGCATGAACATATTGCGAACCTGGCGGGCAGCCCGGCGATTA | |
| | AAAAAGGCATTCTGCAGACCGTGAAAGTGGTGGATGAACTGGTGAAAGTGATGGG | |
| | CCGCCATAAACCGGAAAACATTGTGATTGAAATGGCGCGCGAAAACCAGACCACC | |
| | CAGAAAGGCCAGAAAAACAGCCGCGAACGCATGAAACGCATTGAAGAAGGCATTA | |
| | AAGAACTGGGCAGCCAGATTCTGAAAGAACATCCGGTGGAAAACACCCAGCTGCA | |
| | GAACGAAAAACTGTATCTGTATTATCTGCAGAACGGCCGCGATATGTATGTGGAT | |
| | CAGGAACTGGATATTAACCGCCTGAGCGATTATGATGTGGATCATATTGTGCCGC | |
| | AGAGCTTTCTGAAAGATGATAGCATTGATAACAAAGTGCTGACCCGCAGCGATAA | |
| | AAACCGCGGCAAAAGCGATAACGTGCCGAGCGAAGAAGTGGTGAAAAAAATGAAA | |
| | AACTATTGGCGCCAGCTGCTGAACGCGAAACTGATTACCCAGCGCAAATTTGATA | |
| | ACCTGACCAAAGCGGAACGCGGCGGCCTGAGCGAACTGGATAAAGCGGGCTTTAT | |
| | TAAACGCCAGCTGGTGGAAACCCGCCAGATTACCAAACATGTGGCGCAGATTCTG | |
| | GATAGCCGCATGAACACCAAATATGATGAAAACGATAAACTGATTCGCGAAGTGA | |
| | AAGTGATTACCCTGAAAAGCAAACTGGTGAGCGATTTTCGCAAAGATTTTCAGTT | |
| | TTATAAAGTGCGCGAAATTAACAACTATCATCATGCGCATGATGCGTATCTGAAC | |
| | GCGGTGGTGGGCACCGCGCTGATTAAAAAATATCCGAAACTGGAAAGCGAATTTG | |
| | TGTATGGCGATTATAAAGTGTATGATGTGCGCAAAATGATTGCGAAAAGCGAACA | |
| | GGAAATTGGCAAAGCGACCGCGAAATATTTTTTTTATAGCAACATTATGAACTTT | |
| | TTTAAAACCGAAATTACCCTGGCGAACGGCGAAATTCGCAAACGCCCGCTGATTG | |
| | AAACCAACGGCGAAACCGGCGAAATTGTGTGGGATAAAGGCCGCGATTTTGCGAC | |
| | CGTGCGCAAAGTGCTGAGCATGCCGCAGGTGAACATTGTGAAAAAAACCGAAGTG | |
| | CAGACCGGCGGCTTTAGCAAAGAAAGCATTCTGCCGAAACGCAACAGCGATAAAC | |
| | TGATTGCGCGCAAAAAAGATTGGGATCCGAAAAAATATGGCGGCTTTGATAGCCC | |
| | GACCGTGGCGTATAGCGTGCTGGTGGTGGCGAAAGTGGAAAAAGGCAAAAGCAAA | |
| | AAACTGAAAAGCGTGAAAGAACTGCTGGGCATTACCATTATGGAACGCAGCAGCT | |
| | TTGAAAAAAACCCGATTGATTTTCTGGAAGCGAAAGGCTATAAAGAAGTGAAAAA | |
| | AGATCTGATTATTAAACTGCCGAAATATAGCCTGTTTGAACTGGAAAACGGCCGC | |
| | AAACGCATGCTGGCGAGCGCGGGCGAACTGCAGAAAGGCAACGAACTGGCGCTGC | |
| | CGAGCAAATATGTGAACTTTCTGTATCTGGCGAGCCATTATGAAAAACTGAAAGG | |
| | CAGCCCGGAAGATAACGAACAGAAACAGCTGTTTGTGGAACAGCATAAACATTAT | |
| | CTGGATGAAATTATTGAACAGATTAGCGAATTTAGCAAACGCGTGATTCTGGCGG | |
| | ATGCGAACCTGGATAAAGTGCTGAGCGCGTATAACAAACATCGCGATAAACCGAT | |
| | TCGCGAACAGGCGGAAAACATTATTCATCTGTTTACCCTGACCAACCTGGGCGCG | |
| | CCGGCGGCGTTTAAATATTTTGATACCACCATTGATCGCAAACGCTATACCAGCA | |
| | CCAAAGAAGTGCTGGATGCGACCCTGATTCATCAGAGCATTACCGGCCTGTATGA | |
| | AACCCGCATTGATCTGAGCCAGCTGGGCGGCGAT | |

[0188] The base editors described herein may include canonical SpCas9, or any variant thereof having at least 80%, at least 85%, at least 90%, at least 95%, or at least 99% sequence identity with a wild type Cas9 sequence provided above. These variants may include SpCas9 variants containing one or more mutations, including any known mutation reported with the SwissProt Accession No. Q99ZW2 entry, which include:

| SpCas9 mutation | Function/Characteristic |
|---|---|
| (relative to the amino | (as reported) (see |
| acid sequence of the | UniProtKB—Q99ZW2 |
| canonical SpCas9 | (CAS9_STRPT1) entry— |
| sequence, SEQ ID NO: 5) | incorporated herein by reference) |
| D10A | Nickase mutant which |
| | cleaves the protospacer |
| | strand (but no cleavage of |
| | non-protospacer strand) |
| S15A | Decreased DNA cleavage activity |
| R66A | Decreased DNA cleavage activity |
| R70A | No DNA cleavage |
| R74A | Decreased DNA cleavage |
| R78A | Decreased DNA cleavage |
| 97-150 deletion | No nuclease activity |
| R165A | Decreased DNA cleavage |
| 175-307 deletion | About 50% decreased DNA cleavage |
| 312-409 deletion | No nuclease activity |
| E762A | Nickase |
| H840A | Nickase mutant which cleaves the |
| | non-protospacer strand but does not |
| | cleave the protospacer strand |
| N854A | Nickase |
| N863A | Nickase |
| H982A | Decreased DNA cleavage |
| D986A | Nickase |
| 1099-1368 deletion | No nuclease activity |
| R1333A | Reduced DNA binding |

[0189] Other wild type SpCas9 sequences that may be used in the present disclosure, include:

| | | SEQ |
|---|---|---|
| | | ID |
| Description | Sequence | NO: |
| SpCas9 | ATGGATAAGAAATACTCAATAGGCTTAGATATCGGCACAAATAGCGTCGGATGGGCG | 7 |
| Streptococcus | GTGATCACTGATGATTATAAGGTTCCGTCTAAAAAGTTCAAGGTTCTGGGAAATACA | |
| pyogenes | GACCGCCACAGTATCAAAAAAAATCTTATAGGGGCTCTTTTATTTGGCAGTGGAGAG | |
| MGAS1882 | ACAGCGGAAGCGACTCGTCTCAAACGGACAGCTCGTAGAAGGTATACACGTCGGAAG | |
| wild type | AATCGTATTTGTTATCTACAGGAGATTTTTTCAAATGAGATGGCGAAAGTAGATGAT | |
| NC_017053.1 | AGTTTCTTTCATCGACTTGAAGAGTCTTTTTTGGTGGAAGAAGACAAGAAGCATGAA | |
| | CGTCATCCTATTTTTGGAAATATAGTAGATGAAGTTGCTTATCATGAGAAATATCCA | |
| | ACTATCTATCATCTGCGAAAAAAATTGGCAGATTCTACTGATAAAGCGGATTTGCGC | |
| | TTAATCTATTTGGCCTTAGCGCATATGATTAAGTTTCGTGGTCATTTTTTGATTGAG | |
| | GGAGATTTAAATCCTGATAATAGTGATGTGGACAAACTATTTATCCAGTTGGTACAA | |
| | ATCTACAATCAATTATTTGAAGAAAACCCTATTAACGCAAGTAGAGTAGATGCTAAA | |
| | GCGATTCTTTCTGCACGATTGAGTAAATCAAGACGATTAGAAAATCTCATTGCTCAG | |
| | CTCCCCGGTGAGAAGAGAAATGGCTTGTTTGGGAATCTCATTGCTTTGTCATTGGGA | |
| | TTGACCCCTAATTTTAAATCAAATTTTGATTTGGCAGAAGATGCTAAATTACAGCTT | |
| | TCAAAAGATACTTACGATGATGATTTAGATAATTTATTGGCGCAAATTGGAGATCAA | |
| | TATGCTGATTTGTTTTTGGCAGCTAAGAATTTATCAGATGCTATTTTACTTTCAGAT | |
| | ATCCTAAGAGTAAATAGTGAAATAACTAAGGCTCCCCTATCAGCTTCAATGATTAAG | |
| | CGCTACGATGAACATCATCAAGACTTGACTCTTTTAAAAGCTTTAGTTCGACAACAA | |
| | CTTCCAGAAAAGTATAAAGAAATCTTTTTTGATCAATCAAAAAACGGATATGCAGGT | |
| | TATATTGATGGGGGAGCTAGCCAAGAAGAATTTTATAAATTTATCAAACCAATTTTA | |
| | GAAAAAATGGATGGTACTGAGGAATTATTGGTGAAACTAAATCGTGAAGATTTGCTG | |
| | CGCAAGCAACGGACCTTTGACAACGGCTCTATTCCCCATCAAATTCACTTGGGTGAG | |
| | CTGCATGCTATTTTGAGAAGACAAGAAGACTTTTATCCATTTTTAAAAGACAATCGT | |
| | GAGAAGATTGAAAAAATCTTGACTTTTCGAATTCCTTATTATGTTGGTCCATTGGCG | |
| | CGTGGCAATAGTCGTTTTGCATGGATGACTCGGAAGTCTGAAGAAACAATTACCCCA | |
| | TGGAATTTTGAAGAAGTTGTCGATAAAGGTGCTTCAGCTCAATCATTTATTGAACGC | |
| | ATGACAAACTTTGATAAAAATCTTCCAAATGAAAAAGTACTACCAAAACATAGTTTG | |
| | CTTTATGAGTATTTTACGGTTTATAACGAATTGACAAAGGTCAAATATGTTACTGAG | |
| | GGAATGCGAAAACCAGCATTTCTTTCAGGTGAACAGAAGAAAGCCATTGTTGATTTA | |
| | CTCTTCAAAACAAATCGAAAAGTAACCGTTAAGCAATTAAAAGAAGATTATTTCAAA | |
| | AAAATAGAATGTTTTGATAGTGTTGAAATTTCAGGAGTTGAAGATAGATTTAATGCT | |
| | TCATTAGGCGCCTACCATGATTTGCTAAAAATTATTAAAGATAAAGATTTTTTGGAT | |
| | AATGAAGAAAATGAAGATATCTTAGAGGATATTGTTTTAACATTGACCTTATTTGAA | |
| | GATAGGGGGATGATTGAGGAAAGACTTAAAACATATGCTCACCTCTTTGATGATAAG | |
| | GTGATGAAACAGCTTAAACGTCGCCGTTATACTGGTTGGGGACGTTTGTCTCGAAAA | |
| | TTGATTAATGGTATTAGGGATAAGCAATCTGGCAAAACAATATTAGATTTTTTGAAA | |
| | TCAGATGGTTTTGCCAATCGCAATTTTATGCAGCTGATCCATGATGATAGTTTGACA | |
| | TTTAAAGAAGATATTCAAAAAGCACAGGTGTCTGGACAAGGCCATAGTTTACATGAA | |
| | CAGATTGCTAACTTAGCTGGCAGTCCTGCTATTAAAAAAGGTATTTTACAGACTGTA | |
| | AAAATTGTTGATGAACTGGTCAAAGTAATGGGGCATAAGCCAGAAAATATCGTTATT | |
| | GAAATGGCACGTGAAAATCAGACAACTCAAAAGGGCCAGAAAAATTCGCGAGAGCGT | |
| | ATGAAACGAATCGAAGAAGGTATCAAAGAATTAGGAAGTCAGATTCTTAAAGAGCAT | |
| | CCTGTTGAAAATACTCAATTGCAAAATGAAAAGCTCTATCTCTATTATCTACAAAAT | |
| | GGAAGAGACATGTATGTGGACCAAGAATTAGATATTAATCGTTTAAGTGATTATGAT | |
| | GTCGATCACATTGTTCCACAAAGTTTCATTAAAGACGATTCAATAGACAATAAGGTA | |
| | CTAACGCGTTCTGATAAAAATCGTGGTAAATCGGATAACGTTCCAAGTGAAGAAGTA | |
| | GTCAAAAAGATGAAAAACTATTGGAGACAACTTCTAAACGCCAAGTTAATCACTCAA | |
| | CGTAAGTTTGATAATTTAACGAAAGCTGAACGTGGAGGTTTGAGTGAACTTGATAAA | |
| | GCTGGTTTTATCAAACGCCAATTGGTTGAAACTCGCCAAATCACTAAGCATGTGGCA | |
| | CAAATTTTGGATAGTCGCATGAATACTAAATACGATGAAAATGATAAACTTATTCGA | |
| | GAGGTTAAAGTGATTACCTTAAAATCTAAATTAGTTTCTGACTTCCGAAAAGATTTC | |
| | CAATTCTATAAAGTACGTGAGATTAACAATTACCATCATGCCCATGATGCGTATCTA | |
| | AATGCCGTCGTTGGAACTGCTTTGATTAAGAAATATCCAAAACTTGAATCGGAGTTT | |
| | GTCTATGGTGATTATAAAGTTTATGATGTTCGTAAAATGATTGCTAAGTCTGAGCAA | |
| | GAAATAGGCAAAGCAACCGCAAAATATTTCTTTTACTCTAATATCATGAACTTCTTC | |
| | AAAACAGAAATTACACTTGCAAATGGAGAGATTCGCAAACGCCCTCTAATCGAAACT | |
| | AATGGGGAAACTGGAGAAATTGTCTGGGATAAAGGGCGAGATTTTGCCACAGTGCGC | |
| | AAAGTATTGTCCATGCCCCAAGTCAATATTGTCAAGAAAACAGAAGTACAGACAGGC | |
| | GGATTCTCCAAGGAGTCAATTTTACCAAAAAGAAATTCGGACAAGCTTATTGCTCGT | |
| | AAAAAAGACTGGGATCCAAAAAAATATGGTGGTTTTGATAGTCCAACGGTAGCTTAT | |
| | TCAGTCCTAGTGGTTGCTAAGGTGGAAAAAGGGAAATCGAAGAAGTTAAAATCCGTT | |
| | AAAGAGTTACTAGGGATCACAATTATGGAAAGAAGTTCCTTTGAAAAAAATCCGATT | |
| | GACTTTTTAGAAGCTAAAGGATATAAGGAAGTTAAAAAAGACTTAATCATTAAACTA | |
| | CCTAAATATAGTCTTTTTGAGTTAGAAAACGGTCGTAAACGGATGCTGGCTAGTGCC | |
| | GGAGAATTACAAAAAGGAAATGAGCTGGCTCTGCCAAGCAAATATGTGAATTTTTTA | |
| | TATTTAGCTAGTCATTATGAAAAGTTGAAGGGTAGTCCAGAAGATAACGAACAAAAA | |
| | CAATTGTTTGTGGAGCAGCATAAGCATTATTTAGATGAGATTATTGAGCAAATCAGT | |
| | GAATTTTCTAAGCGTGTTATTTTAGCAGATGCCAATTTAGATAAAGTTCTTAGTGCA | |
| | TATAACAAACATAGAGACAAACCAATACGTGAACAAGCAGAAAATATTATTCATTTA | |
| | TTTACGTTGACGAATCTTGGAGCTCCCGCTGCTTTTAAATATTTTGATACAACAATT | |
| | GATCGTAAACGATATACGTCTACAAAAGAAGTTTTAGATGCCACTCTTATCCATCAA | |
| | TCCATCACTGGTCTTTATGAAACACGCATTGATTTGAGTCAGCTAGGAGGTGACTGA | |
| SpCas9 | MDKKYSIGLDIGTNSVGWAVITDDYKVPSKKFKVLGNTDRHSIKKNLIGALLFGSGE | 8 |
| Streptococcus | TAEATRLKRTARRRYTRRKNRICYLQEIFSNEMAKVDDSFFHRLEESFLVEEDKKHE | |
| pyogenes | RHPIFGNIVDEVAYHEKYPTIYHLRKKLADSTDKADLRLIYLALAHMIKFRGHFLIE | |
| MGAS1882 | GDLNPDNSDVDKLFIQLVQIYNQLFEENPINASRVDAKAILSARLSKSRRLENLIAQ | |
| wild type | LPGEKRNGLFGNLIALSLGLTPNFKSNFDLAEDAKLQLSKDTYDDDLDNLLAQIGDQ | |
| NC_017053.1 | YADLFLAAKNLSDAILLSDILRVNSEITKAPLSASMIKRYDEHHQDLTLLKALVRQQ | |
| | LPEKYKEIFFDQSKNGYAGYIDGGASQEEFYKFIKPILEKMDGTEELLVKLNREDLL | |
| | RKQRTFDNGSIPHQIHLGELHAILRRQEDFYPFLKDNREKIEKILTFRIPYYVGPLA | |
| | RGNSRFAWMTRKSEETITPWNFEEWDKGASAQSFIERMTNFDKNLPNEKVLPKHSL | |
| | LYEYFTVYNELTKVKYVTEGMRKPAFLSGEQKKAIVDLLFKTNRKVTVKQLKEDYFK | |
| | KIECFDSVEISGVEDRFNASLGAYHDLLKIIKDKDFLDNEENEDILEDIVLTLTLFE | |
| | DRGMIEERLKTYAHLFDDKVMKQLKRRRYTGWGRLSRKLINGIRDKQSGKTILDFLK | |
| | SDGFANRNFMQLIHDDSLTFKEDIQKAQVSGQGHSLHEQIANLAGSPAIKKGILQTV | |
| | KIVDELVKVMGHKPENIVIEMARENQTTQKGQKNSRERMKRIEEGIKELGSQILKEH | |
| | PVENTQLQNEKLYLYYLQNGRDMYVDQELDINRLSDYDVDHIVPQSFIKDDSIDNKV | |
| | LTRSDKNRGKSDNVPSEEWKKMKNYWRQLLNAKLITQRKFDNLTKAERGGLSELDK | |
| | AGFIKRQLVETRQITKHVAQILDSRMNTKYDENDKLIREVKVITLKSKLVSDFRKDF | |
| | QFYKVREINNYHHAHDAYLNAVVGTALIKKYPKLESEFVYGDYKVYDVRKMIAKSEQ | |
| | EIGKATAKYFFYSNIMNFFKTEITLANGEIRKRPLIETNGETGEIVWDKGRDFATVR | |
| | KVLSMPQVNIVKKTEVQTGGFSKESILPKRNSDKLIARKKDWDPKKYGGFDSPTVAY | |
| | SVLVVAKVEKGKSKKLKSVKELLGITIMERSSFEKNPIDFLEAKGYKEVKKDLIIKL | |
| | PKYSLFELENGRKRMLASAGELQKGNELALPSKYVNFLYLASHYEKLKGSPEDNEQK | |
| | QLFVEQHKHYLDEIIEQISEFSKRVILADANLDKVLSAYNKHRDKPIREQAENIIHL | |
| | FTLTNLGAPAAFKYFDTTIDRKRYTSTKEVLDATLIHQSITGLYETRIDLSQLGGD | |
| SpCas9 | ATGGATAAAAAGTATTCTATTGGTTTAGACATCGGCACTAATTCCGTTGGATGGGCT | 9 |
| Streptococcus | GTCATAACCGATGAATACAAAGTACCTTCAAAGAAATTTAAGGTGTTGGGGAACACA | |
| pyogenes | GACCGTCATTCGATTAAAAAGAATCTTATCGGTGCCCTCCTATTCGATAGTGGCGAA | |
| wild type | ACGGCAGAGGCGACTCGCCTGAAACGAACCGCTCGGAGAAGGTATACACGTCGCAAG | |
| SWBC2D7W014 | AACCGAATATGTTACTTACAAGAAATTTTTAGCAATGAGATGGCCAAAGTTGACGAT | |
| | TCTTTCTTTCACCGTTTGGAAGAGTCCTTCCTTGTCGAAGAGGACAAGAAACATGAA | |
| | CGGCACCCCATCTTTGGAAACATAGTAGATGAGGTGGCATATCATGAAAAGTACCCA | |
| | ACGATTTATCACCTCAGAAAAAAGCTAGTTGACTCAACTGATAAAGCGGACCTGAGG | |
| | TTAATCTACTTGGCTCTTGCCCATATGATAAAGTTCCGTGGGCACTTTCTCATTGAG | |
| | GGTGATCTAAATCCGGACAACTCGGATGTCGACAAACTGTTCATCCAGTTAGTACAA | |
| | ACCTATAATCAGTTGTTTGAAGAGAACCCTATAAATGCAAGTGGCGTGGATGCGAAG | |
| | GCTATTCTTAGCGCCCGCCTCTCTAAATCCCGACGGCTAGAAAACCTGATCGCACAA | |
| | TTACCCGGAGAGAAGAAAAATGGGTTGTTCGGTAACCTTATAGCGCTCTCACTAGGC | |
| | CTGACACCAAATTTTAAGTCGAACTTCGACTTAGCTGAAGATGCCAAATTGCAGCTT | |
| | AGTAAGGACACGTACGATGACGATCTCGACAATCTACTGGCACAAATTGGAGATCAG | |
| | TATGCGGACTTATTTTTGGCTGCCAAAAACCTTAGCGATGCAATCCTCCTATCTGAC | |
| | ATACTGAGAGTTAATACTGAGATTACCAAGGCGCCGTTATCCGCTTCAATGATCAAA | |
| | AGGTACGATGAACATCACCAAGACTTGACACTTCTCAAGGCCCTAGTCCGTCAGCAA | |
| | CTGCCTGAGAAATATAAGGAAATATTCTTTGATCAGTCGAAAAACGGGTACGCAGGT | |
| | TATATTGACGGCGGAGCGAGTCAAGAGGAATTCTACAAGTTTATCAAACCCATATTA | |
| | GAGAAGATGGATGGGACGGAAGAGTTGCTTGTAAAACTCAATCGCGAAGATCTACTG | |
| | CGAAAGCAGCGGACTTTCGACAACGGTAGCATTCCACATCAAATCCACTTAGGCGAA | |
| | TTGCATGCTATACTTAGAAGGCAGGAGGATTTTTATCCGTTCCTCAAAGACAATCGT | |
| | GAAAAGATTGAGAAAATCCTAACCTTTCGCATACCTTACTATGTGGGACCCCTGGCC | |
| | CGAGGGAACTCTCGGTTCGCATGGATGACAAGAAAGTCCGAAGAAACGATTACTCCA | |
| | TGGAATTTTGAGGAAGTTGTCGATAAAGGTGCGTCAGCTCAATCGTTCATCGAGAGG | |
| | ATGACCAACTTTGACAAGAATTTACCGAACGAAAAAGTATTGCCTAAGCACAGTTTA | |
| | CTTTACGAGTATTTCACAGTGTACAATGAACTCACGAAAGTTAAGTATGTCACTGAG | |
| | GGCATGCGTAAACCCGCCTTTCTAAGCGGAGAACAGAAGAAAGCAATAGTAGATCTG | |
| | TTATTCAAGACCAACCGCAAAGTGACAGTTAAGCAATTGAAAGAGGACTACTTTAAG | |
| | AAAATTGAATGCTTCGATTCTGTCGAGATCTCCGGGGTAGAAGATCGATTTAATGCG | |
| | TCACTTGGTACGTATCATGACCTCCTAAAGATAATTAAAGATAAGGACTTCCTGGAT | |
| | AACGAAGAGAATGAAGATATCTTAGAAGATATAGTGTTGACTCTTACCCTCTTTGAA | |
| | GATCGGGAAATGATTGAGGAAAGACTAAAAACATACGCTCACCTGTTCGACGATAAG | |
| | GTTATGAAACAGTTAAAGAGGCGTCGCTATACGGGCTGGGGACGATTGTCGCGGAAA | |
| | CTTATCAACGGGATAAGAGACAAGCAAAGTGGTAAAACTATTCTCGATTTTCTAAAG | |
| | AGCGACGGCTTCGCCAATAGGAACTTTATGCAGCTGATCCATGATGACTCTTTAACC | |
| | TTCAAAGAGGATATACAAAAGGCACAGGTTTCCGGACAAGGGGACTCATTGCACGAA | |
| | CATATTGCGAATCTTGCTGGTTCGCCAGCCATCAAAAAGGGCATACTCCAGACAGTC | |
| | AAAGTAGTGGATGAGCTAGTTAAGGTCATGGGACGTCACAAACCGGAAAACATTGTA | |
| | ATCGAGATGGCACGCGAAAATCAAACGACTCAGAAGGGGCAAAAAAACAGTCGAGAG | |
| | CGGATGAAGAGAATAGAAGAGGGTATTAAAGAACTGGGCAGCCAGATCTTAAAGGAG | |
| | CATCCTGTGGAAAATACCCAATTGCAGAACGAGAAACTTTACCTCTATTACCTACAA | |
| | AATGGAAGGGACATGTATGTTGATCAGGAACTGGACATAAACCGTTTATCTGATTAC | |
| | GACGTCGATCACATTGTACCCCAATCCTTTTTGAAGGACGATTCAATCGACAATAAA | |
| | GTGCTTACACGCTCGGATAAGAACCGAGGGAAAAGTGACAATGTTCCAAGCGAGGAA | |
| | GTCGTAAAGAAAATGAAGAACTATTGGCGGCAGCTCCTAAATGCGAAACTGATAACG | |
| | CAAAGAAAGTTCGATAACTTAACTAAAGCTGAGAGGGGTGGCTTGTCTGAACTTGAC | |
| | AAGGCCGGATTTATTAAACGTCAGCTCGTGGAAACCCGCCAAATCACAAAGCATGTT | |
| | GCACAGATACTAGATTCCCGAATGAATACGAAATACGACGAGAACGATAAGCTGATT | |
| | CGGGAAGTCAAAGTAATCACTTTAAAGTCAAAATTGGTGTCGGACTTCAGAAAGGAT | |
| | TTTCAATTCTATAAAGTTAGGGAGATAAATAACTACCACCATGCGCACGACGCTTAT | |
| | CTTAATGCCGTCGTAGGGACCGCACTCATTAAGAAATACCCGAAGCTAGAAAGTGAG | |
| | TTTGTGTATGGTGATTACAAAGTTTATGACGTCCGTAAGATGATCGCGAAAAGCGAA | |
| | CAGGAGATAGGCAAGGCTACAGCCAAATACTTCTTTTATTCTAACATTATGAATTTC | |
| | TTTAAGACGGAAATCACTCTGGCAAACGGAGAGATACGCAAACGACCTTTAATTGAA | |
| | ACCAATGGGGAGACAGGTGAAATCGTATGGGATAAGGGCCGGGACTTCGCGACGGTG | |
| | AGAAAAGTTTTGTCCATGCCCCAAGTCAACATAGTAAAGAAAACTGAGGTGCAGACC | |
| | GGAGGGTTTTCAAAGGAATCGATTCTTCCAAAAAGGAATAGTGATAAGCTCATCGCT | |
| | CGTAAAAAGGACTGGGACCCGAAAAAGTACGGTGGCTTCGATAGCCCTACAGTTGCC | |
| | TATTCTGTCCTAGTAGTGGCAAAAGTTGAGAAGGGAAAATCCAAGAAACTGAAGTCA | |
| | GTCAAAGAATTATTGGGGATAACGATTATGGAGCGCTCGTCTTTTGAAAAGAACCCC | |
| | ATCGACTTCCTTGAGGCGAAAGGTTACAAGGAAGTAAAAAAGGATCTCATAATTAAA | |
| | CTACCAAAGTATAGTCTGTTTGAGTTAGAAAATGGCCGAAAACGGATGTTGGCTAGC | |
| | GCCGGAGAGCTTCAAAAGGGGAACGAACTCGCACTACCGTCTAAATACGTGAATTTC | |
| | CTGTATTTAGCGTCCCATTACGAGAAGTTGAAAGGTTCACCTGAAGATAACGAACAG | |
| | AAGCAACTTTTTGTTGAGCAGCACAAACATTATCTCGACGAAATCATAGAGCAAATT | |
| | TCGGAATTCAGTAAGAGAGTCATCCTAGCTGATGCCAATCTGGACAAAGTATTAAGC | |
| | GCATACAACAAGCACAGGGATAAACCCATACGTGAGCAGGCGGAAAATATTATCCAT | |
| | TTGTTTACTCTTACCAACCTCGGCGCTCCAGCCGCATTCAAGTATTTTGACACAACG | |
| | ATAGATCGCAAACGATACACTTCTACCAAGGAGGTGCTAGACGCGACACTGATTCAC | |
| | CAATCCATCACGGGATTATATGAAACTCGGATAGATTTGTCACAGCTTGGGGGTGAC | |
| | GGATCCCCCAAGAAGAAGAGGAAAGTCTCGAGCGACTACAAAGACCATGACGGTGAT | |
| | TATAAAGATCATGACATCGATTACAAGGATGACGATGACAAGGCTGCAGGA | |
| SpCas9 | MDKKYSIGLDIGTNSVGWAVITDEYKVPSKKFKVLGNTDRHSIKKNLIGALLFDSGE | 10 |
| Streptococcus | TAEATRLKRTARRRYTRRKNRICYLQEIFSNEMAKVDDSFFHRLEESFLVEEDKKHE | |
| pyogenes | RHPIFGNIVDEVAYHEKYPTIYHLRKKLVDSTDKADLRLIYLALAHMIKFRGHFLIE | |
| wild type | GDLNPDNSDVDKLFIQLVQTYNQLFEENPINASGVDAKAILSARLSKSRRLENLIAQ | |
| Encoded | LPGEKKNGLFGNLIALSLGLTPNFKSNFDLAEDAKLQLSKDTYDDDLDNLLAQIGDQ | |
| product of | YADLFLAAKNLSDAILLSDILRVNTEITKAPLSASMIKRYDEHHQDLTLLKALVRQQ | |
| SWBC2D7W014 | LPEKYKEIFFDQSKNGYAGYIDGGASQEEFYKFIKPILEKMDGTEELLVKLNREDLL | |
| | RKQRTFDNGSIPHQIHLGELHAILRRQEDFYPFLKDNREKIEKILTFRIPYYVGPLA | |
| | RGNSRFAWMTRKSEETITPWNFEEVVDKGASAQSFIERMTNFDKNLPNEKVLPKHSL | |
| | LYEYFTVYNELTKVKYVTEGMRKPAFLSGEQKKAIVDLLFKTNRKVTVKQLKEDYFK | |
| | KIECFDSVEISGVEDRFNASLGTYHDLLKIIKDKDFLDNEENEDILEDIVLTLTLFE | |
| | DREMIEERLKTYAHLFDDKVMKQLKRRRYTGWGRLSRKLINGIRDKQSGKTILDFLK | |
| | SDGFANRNFMQLIHDDSLTFKEDIQKAQVSGQGDSLHEHIANLAGSPAIKKGILQTV | |
| | KVVDELVKVMGRHKPENIVIEMARENQTTQKGQKNSRERMKRIEEGIKELGSQILKE | |
| | HPVENTQLQNEKLYLYYLQNGRDMYVDQELDINRLSDYDVDHIVPQSFLKDDSIDNK | |
| | VLTRSDKNRGKSDNVPSEEVVKKMKNYWRQLLNAKLITQRKFDNLTKAERGGLSELD | |
| | KAGFIKRQLVETRQITKHVAQILDSRMNTKYDENDKLIREVKVITLKSKLVSDFRKD | |
| | FQFYKVREINNYHHAHDAYLNAVVGTALIKKYPKLESEFVYGDYKVYDVRKMIAKSE | |
| | QEIGKATAKYFFYSNIMNFFKTEITLANGEIRKRPLIETNGETGEIVWDKGRDFATV | |
| | RKVLSMPQVNIVKKTEVQTGGFSKESILPKRNSDKLIARKKDWDPKKYGGFDSPTVA | |
| | YSVLVVAKVEKGKSKKLKSVKELLGITIMERSSFEKNPIDFLEAKGYKEVKKDLIIK | |
| | LPKYSLFELENGRKRMLASAGELQKGNELALPSKYVNFLYLASHYEKLKGSPEDNEQ | |
| | KQLFVEQHKHYLDEIIEQISEFSKRVILADANLDKVLSAYNKHRDKPIREQAENIIH | |
| | LFTLTNLGAPAAFKYFDTTIDRKRYTSTKEVLDATLIHQSITGLYETRIDLSQLGGD | |
| | GSPKKKRKVSSDYKDHDGDYKDHDIDYKDDDDKAAG | |
| SpCas9 | ATGGATAAGAAATACTCAATAGGCTTAGATATCGGCACAAATAGCGTCGGATGGGCG | 11 |
| Streptococcus | GTGATCACTGATGAATATAAGGTTCCGTCTAAAAAGTTCAAGGTTCTGGGAAATACA | |
| pyogenes | GACCGCCACAGTATCAAAAAAAATCTTATAGGGGCTCTTTTATTTGACAGTGGAGAG | |
| M1GAS wild | ACAGCGGAAGCGACTCGTCTCAAACGGACAGCTCGTAGAAGGTATACACGTCGGAAG | |
| type | AATCGTATTTGTTATCTACAGGAGATTTTTTCAAATGAGATGGCGAAAGTAGATGAT | |
| NC_002737.2 | AGTTTCTTTCATCGACTTGAAGAGTCTTTTTTGGTGGAAGAAGACAAGAAGCATGAA | |
| | CGTCATCCTATTTTTGGAAATATAGTAGATGAAGTTGCTTATCATGAGAAATATCCA | |
| | ACTATCTATCATCTGCGAAAAAAATTGGTAGATTCTACTGATAAAGCGGATTTGCGC | |
| | TTAATCTATTTGGCCTTAGCGCATATGATTAAGTTTCGTGGTCATTTTTTGATTGAG | |
| | GGAGATTTAAATCCTGATAATAGTGATGTGGACAAACTATTTATCCAGTTGGTACAA | |
| | ACCTACAATCAATTATTTGAAGAAAACCCTATTAACGCAAGTGGAGTAGATGCTAAA | |
| | GCGATTCTTTCTGCACGATTGAGTAAATCAAGACGATTAGAAAATCTCATTGCTCAG | |
| | CTCCCCGGTGAGAAGAAAAATGGCTTATTTGGGAATCTCATTGCTTTGTCATTGGGT | |
| | TTGACCCCTAATTTTAAATCAAATTTTGATTTGGCAGAAGATGCTAAATTACAGCTT | |
| | TCAAAAGATACTTACGATGATGATTTAGATAATTTATTGGCGCAAATTGGAGATCAA | |
| | TATGCTGATTTGTTTTTGGCAGCTAAGAATTTATCAGATGCTATTTTACTTTCAGAT | |
| | ATCCTAAGAGTAAATACTGAAATAACTAAGGCTCCCCTATCAGCTTCAATGATTAAA | |
| | CGCTACGATGAACATCATCAAGACTTGACTCTTTTAAAAGCTTTAGTTCGACAACAA | |
| | CTTCCAGAAAAGTATAAAGAAATCTTTTTTGATCAATCAAAAAACGGATATGCAGGT | |
| | TATATTGATGGGGGAGCTAGCCAAGAAGAATTTTATAAATTTATCAAACCAATTTTA | |
| | GAAAAAATGGATGGTACTGAGGAATTATTGGTGAAACTAAATCGTGAAGATTTGCTG | |
| | CGCAAGCAACGGACCTTTGACAACGGCTCTATTCCCCATCAAATTCACTTGGGTGAG | |
| | CTGCATGCTATTTTGAGAAGACAAGAAGACTTTTATCCATTTTTAAAAGACAATCGT | |
| | GAGAAGATTGAAAAAATCTTGACTTTTCGAATTCCTTATTATGTTGGTCCATTGGCG | |
| | CGTGGCAATAGTCGTTTTGCATGGATGACTCGGAAGTCTGAAGAAACAATTACCCCA | |
| | TGGAATTTTGAAGAAGTTGTCGATAAAGGTGCTTCAGCTCAATCATTTATTGAACGC | |
| | ATGACAAACTTTGATAAAAATCTTCCAAATGAAAAAGTACTACCAAAACATAGTTTG | |
| | CTTTATGAGTATTTTACGGTTTATAACGAATTGACAAAGGTCAAATATGTTACTGAA | |
| | GGAATGCGAAAACCAGCATTTCTTTCAGGTGAACAGAAGAAAGCCATTGTTGATTTA | |
| | CTCTTCAAAACAAATCGAAAAGTAACCGTTAAGCAATTAAAAGAAGATTATTTCAAA | |
| | AAAATAGAATGTTTTGATAGTGTTGAAATTTCAGGAGTTGAAGATAGATTTAATGCT | |
| | TCATTAGGTACCTACCATGATTTGCTAAAAATTATTAAAGATAAAGATTTTTTGGAT | |
| | AATGAAGAAAATGAAGATATCTTAGAGGATATTGTTTTAACATTGACCTTATTTGAA | |
| | GATAGGGAGATGATTGAGGAAAGACTTAAAACATATGCTCACCTCTTTGATGATAAG | |
| | GTGATGAAACAGCTTAAACGTCGCCGTTATACTGGTTGGGGACGTTTGTCTCGAAAA | |
| | TTGATTAATGGTATTAGGGATAAGCAATCTGGCAAAACAATATTAGATTTTTTGAAA | |
| | TCAGATGGTTTTGCCAATCGCAATTTTATGCAGCTGATCCATGATGATAGTTTGACA | |
| | TTTAAAGAAGACATTCAAAAAGCACAAGTGTCTGGACAAGGCGATAGTTTACATGAA | |
| | CATATTGCAAATTTAGCTGGTAGCCCTGCTATTAAAAAAGGTATTTTACAGACTGTA | |
| | AAAGTTGTTGATGAATTGGTCAAAGTAATGGGGCGGCATAAGCCAGAAAATATCGTT | |
| | ATTGAAATGGCACGTGAAAATCAGACAACTCAAAAGGGCCAGAAAAATTCGCGAGAG | |
| | CGTATGAAACGAATCGAAGAAGGTATCAAAGAATTAGGAAGTCAGATTCTTAAAGAG | |
| | CATCCTGTTGAAAATACTCAATTGCAAAATGAAAAGCTCTATCTCTATTATCTCCAA | |
| | AATGGAAGAGACATGTATGTGGACCAAGAATTAGATATTAATCGTTTAAGTGATTAT | |
| | GATGTCGATCACATTGTTCCACAAAGTTTCCTTAAAGACGATTCAATAGACAATAAG | |
| | GTCTTAACGCGTTCTGATAAAAATCGTGGTAAATCGGATAACGTTCCAAGTGAAGAA | |
| | GTAGTCAAAAAGATGAAAAACTATTGGAGACAACTTCTAAACGCCAAGTTAATCACT | |
| | CAACGTAAGTTTGATAATTTAACGAAAGCTGAACGTGGAGGTTTGAGTGAACTTGAT | |
| | AAAGCTGGTTTTATCAAACGCCAATTGGTTGAAACTCGCCAAATCACTAAGCATGTG | |
| | GCACAAATTTTGGATAGTCGCATGAATACTAAATACGATGAAAATGATAAACTTATT | |
| | CGAGAGGTTAAAGTGATTACCTTAAAATCTAAATTAGTTTCTGACTTCCGAAAAGAT | |
| | TTCCAATTCTATAAAGTACGTGAGATTAACAATTACCATCATGCCCATGATGCGTAT | |
| | CTAAATGCCGTCGTTGGAACTGCTTTGATTAAGAAATATCCAAAACTTGAATCGGAG | |
| | TTTGTCTATGGTGATTATAAAGTTTATGATGTTCGTAAAATGATTGCTAAGTCTGAG | |
| | CAAGAAATAGGCAAAGCAACCGCAAAATATTTCTTTTACTCTAATATCATGAACTTC | |
| | TTCAAAACAGAAATTACACTTGCAAATGGAGAGATTCGCAAACGCCCTCTAATCGAA | |
| | ACTAATGGGGAAACTGGAGAAATTGTCTGGGATAAAGGGCGAGATTTTGCCACAGTG | |
| | CGCAAAGTATTGTCCATGCCCCAAGTCAATATTGTCAAGAAAACAGAAGTACAGACA | |
| | GGCGGATTCTCCAAGGAGTCAATTTTACCAAAAAGAAATTCGGACAAGCTTATTGCT | |
| | CGTAAAAAAGACTGGGATCCAAAAAAATATGGTGGTTTTGATAGTCCAACGGTAGCT | |
| | TATTCAGTCCTAGTGGTTGCTAAGGTGGAAAAAGGGAAATCGAAGAAGTTAAAATCC | |
| | GTTAAAGAGTTACTAGGGATCACAATTATGGAAAGAAGTTCCTTTGAAAAAAATCCG | |
| | ATTGACTTTTTAGAAGCTAAAGGATATAAGGAAGTTAAAAAAGACTTAATCATTAAA | |
| | CTACCTAAATATAGTCTTTTTGAGTTAGAAAACGGTCGTAAACGGATGCTGGCTAGT | |
| | GCCGGAGAATTACAAAAAGGAAATGAGCTGGCTCTGCCAAGCAAATATGTGAATTTT | |
| | TTATATTTAGCTAGTCATTATGAAAAGTTGAAGGGTAGTCCAGAAGATAACGAACAA | |
| | AAACAATTGTTTGTGGAGCAGCATAAGCATTATTTAGATGAGATTATTGAGCAAATC | |
| | AGTGAATTTTCTAAGCGTGTTATTTTAGCAGATGCCAATTTAGATAAAGTTCTTAGT | |
| | GCATATAACAAACATAGAGACAAACCAATACGTGAACAAGCAGAAAATATTATTCAT | |
| | TTATTTACGTTGACGAATCTTGGAGCTCCCGCTGCTTTTAAATATTTTGATACAACA | |
| | ATTGATCGTAAACGATATACGTCTACAAAAGAAGTTTTAGATGCCACTCTTATCCAT | |
| | CAATCCATCACTGGTCTTTATGAAACACGCATTGATTTGAGTCAGCTAGGAGGTGAC | |
| | TGA | |
| SpCas9 | MDKKYSIGLDIGTNSVGWAVITDEYKVPSKKFKVLGNTDRHSIKKNLIGALLFDSGE | 12 |
| Streptococcus | TAEATRLKRTARRRYTRRKNRICYLQEIFSNEMAKVDDSFFHRLEESFLVEEDKKHE | |
| pyogenes | RHPIFGNIVDEVAYHEKYPTIYHLRKKLVDSTDKADLRLIYLALAHMIKFRGHFLIE | |
| M1GAS wild | GDLNPDNSDVDKLFIQLVQTYNQLFEENPINASGVDAKAILSARLSKSRRLENLIAQ | |
| type | LPGEKKNGLFGNLIALSLGLTPNFKSNFDLAEDAKLQLSKDTYDDDLDNLLAQIGDQ | |
| Encoded | YADLFLAAKNLSDAILLSDILRVNTEITKAPLSASMIKRYDEHHQDLTLLKALVRQO | |
| product of | LPEKYKEIFFDQSKNGYAGYIDGGASQEEFYKFIKPILEKMDGTEELLVKLNREDLL | |
| NC_002737.2 | RKQRTFDNGSIPHQIHLGELHAILRRQEDFYPFLKDNREKIEKILTFRIPYYVGPLA | |
| (100% | RGNSRFAWMTRKSEETITPWNFEEVVDKGASAQSFIERMTNFDKNLPNEKVLPKHSL | |
| identical to | LYEYFTVYNELTKVKYVTEGMRKPAFLSGEQKKAIVDLLFKTNRKVTVKQLKEDYFK | |
| the | KIECFDSVEISGVEDRFNASLGTYHDLLKIIKDKDFLDNEENEDILEDIVLTLTLFE | |
| canonical | DREMIEERLKTYAHLFDDKVMKQLKRRRYTGWGRLSRKLINGIRDKQSGKTILDFLK | |
| Q99ZW2 | SDGFANRNFMQLIHDDSLTFKEDIQKAQVSGQGDSLHEHIANLAGSPAIKKGILQTV | |
| wild type) | KVVDELVKVMGRHKPENIVIEMARENQTTQKGQKNSRERMKRIEEGIKELGSQILKE | |
| | HPVENTQLQNEKLYLYYLQNGRDMYVDQELDINRLSDYDVDHIVPQSFLKDDSIDNK | |
| | VLTRSDKNRGKSDNVPSEEVVKKMKNYWRQLLNAKLITQRKFDNLTKAERGGLSELD | |
| | KAGFIKRQLVETRQITKHVAQILDSRMNTKYDENDKLIREVKVITLKSKLVSDFRKD | |
| | FQFYKVREINNYHHAHDAYLNAVVGTALIKKYPKLESEFVYGDYKVYDVRKMIAKSE | |
| | QEIGKATAKYFFYSNIMNFFKTEITLANGEIRKRPLIETNGETGEIVWDKGRDFATV | |
| | RKVLSMPQVNIVKKTEVQTGGFSKESILPKRNSDKLIARKKDWDPKKYGGFDSPTVA | |
| | YSVLVVAKVEKGKSKKLKSVKELLGITIMERSSFEKNPIDFLEAKGYKEVKKDLIIK | |
| | LPKYSLFELENGRKRMLASAGELQKGNELALPSKYVNFLYLASHYEKLKGSPEDNEQ | |
| | KQLFVEQHKHYLDEIIEQISEFSKRVILADANLDKVLSAYNKHRDKPIREQAENIIH | |
| | LFTLTNLGAPAAFKYFDTTIDRKRYTSTKEVLDATLIHQSITGLYETRIDLSQLGGD | |

[0190] The base editors described herein may include any of the above SpCas9 sequences, or any variant thereof having at least 80%, at least 85%, at least 90%, at least 95%, or at least 99% sequence identity thereto.

### (2) Wild Type Cas9 Orthologs

[0191] In other embodiments, the Cas9 protein can be a wild type Cas9 ortholog from another bacterial species different from the canonical Cas9 from S. pyogenes. For example, the following Cas9 orthologs can be used in connection with the base editor constructs described in this specification. In addition, any variant Cas9 orthologs having at least 80%, at least 85%, at least 90%, at least 95%, or at least 99% sequence identity to any of the below orthologs may also be used with the present base editors.

| Description | Sequence |
|---|---|
| LfCas9 | MKEYHIGLDIGTSSIGWAVTDSQFKLMRIKGKTAIGVRLFEEGKTAAERRTFRTTRRRLKRRKWRLHYLDEIFAPHLQEVD |
| Lactobacillus | ENFLRRLKQSNIHPEDPTKNQAFIGKLLFPDLLKKNERGYPTLIKMRDELPVEQRAHYPVMNIYKLREAMINEDRQFDLRE |
| fermentum | VYLAVHHIVKYRGHFLNNASVDKFKVGRIDFDKSFNVLNEAYEELQNGEGSFTIEPSKVEKIGQLLLDTKMRKLDRQKAVA |
| wild type | KLLEVKVADKEETKRNKQIATAMSKLVLGYKADFATVAMANGNEWKIDLSSETSEDEIEKFREELSDAQNDILTEITSLFS |
| GenBank: | QIMLNEIVPNGMSISESMMDRYWTHERQLAEVKEYLATQPASARKEFDQVYNKYIGQAPKERGFDLEKGLKKILSKKENWK |
| SNX31424.11 | EIDELLKAGDFLPKQRTSANGVIPHQMHQQELDRIIEKQAKYYPWLATENPATGERDRHQAKYELDQLVSFRIPYYVGPLV |
| | TPEVQKATSGAKFAWAKRKEDGEITPWNLWDKIDRAESAEAFIKRMTVKDTYLLNEDVLPANSLLYQKYNVLNELNNVRVN |
| | GRRLSVGIKQDIYTELFKKKKTVKASDVASLVMAKTRGVNKPSVEGLSDPKKFNSNLATYLDLKSIVGDKVDDNRYQTDLE |
| | NIIEWRSVFEDGEIFADKLTEVEWLTDEQRSALVKKRYKGWGRLSKKLLTGIVDENGQRIIDLMWNTDQNFKEIVDQPVFK |
| | EQIDQLNQKAITNDGMTLRERVESVLDDAYTSPQNKKAIWQVVRVVEDIVKAVGNAPKSISIEFARNEGNKGEITRSRRTQ |
| | LQKLFEDQAHELVKDTSLTEELEKAPDLSDRYYFYFTQGGKDMYTGDPINFDEISTKYDIDHILPQSFVKDNSLDNRVLTS |
| | RKENNKKSDQVPAKLYAAKMKPYWNQLLKQGLITQRKFENLTKDVDQNIKYRSLGFVKRQLVETRQVIKLTANILGSMYQE |
| | AGTEIIETRAGLTKQLREEFDLPKVREVNDYHHAVDAYLTTFAGQYLNRRYPKLRSFFVYGEYMKFKHGSDLKLRNFNFFH |
| | ELMEGDKSQGKVVDQQTGELITTRDEVAKSFDRLLNMKYMLVSKEVHDRSDQLYGATIVTAKESGKLTSPIEIKKNRLVDL |
| | YGAYTNGTSAFMTIIKFTGNKPKYKVIGIPTTSAASLKRAGKPGSESYNQELHRIIKSNPKVKKGFEIVVPHVSYGQLIVD |
| | GDCKFTLASPTVQHPATQLVLSKKSLETISSGYKILKDKPAIANERLIRVFDEVVGQMNRYFTIFDQRSNRQKVADARDKF |
| | LSLPTESKYEGAKKVQVGKTEVITNLLMGLHANATQGDLKVLGLATFGFFQSTTGLSLSEDTMIVYQSPTGLFERRICLKD |
| | I (SEQ ID NO: 13) |
| SaCas9 | MDKKYSIGLDIGTNSVGWAVITDEYKVPSKKFKVLGNTDRHSIKKNLIGALLFDSGETAEATRLKRTARRRYTRRKNRICY |
| Staphylococcus | LQEIFSNEMAKVDDSFFHRLEESFLVEEDKKHERHPIFGNIVDEVAYHEKYPTIYHLRKKLVDSTDKADLRLIYLALAHMI |
| aureus | KFRGHFLIEGDLNPDNSDVDKLFIQLVQTYNQLFEENPINASGVDAKAILSARLSKSRRLENLIAQLPGEKKNGLFGNLIA |
| wild type | LSLGLTPNFKSNFDLAEDAKLQLSKDTYDDDLDNLLAQIGDQYADLFLAAKNLSDAILLSDILRVNTEITKAPLSASMIKR |
| GenBank: | YDEHHQDLTLLKALVRQQLPEKYKEIFFDQSKNGYAGYIDGGASQEEFYKFIKPILEKMDGTEELLVKLNREDLLRKQRTF |
| AYD60528.1 | DNGSIPHQIHLGELHAILRRQEDFYPFLKDNREKIEKILTFRIPYYVGPLARGNSRFAWMTRKSEETITPWNFEEVVDKGA |
| | SAQSFIERMTNFDKNLPNEKVLPKHSLLYEYFTVYNELTKVKYVTEGMRKPAFLSGEQKKAIVDLLFKTNRKVTVKQLKED |
| | YFKKIECFDSVEISGVEDRFNASLGTYHDLLKIIKDKDFLDNEENEDILEDIVLTLTLFEDREMIEERLKTYAHLFDDKVM |
| | KQLKRRRYTGWGRLSRKLINGIRDKQSGKTILDFLKSDGFANRNFMQLIHDDSLTFKEDIQKAQVSGQGDSLHEHIANLAG |
| | SPAIKKGILQTVKVVDELVKVMGRHKPENIVIEMARENQTTQKGQKNSRERMKRIEEGIKELGSQILKEHPVENTQLQNEK |
| | LYLYYLQNGRDMYVDQELDINRLSDYDVDHIVPQSFLKDDSIDNKVLTRSDKNRGKSDNVPSEEVVKKMKNYWRQLLNAKL |
| | ITQRKFDNLTKAERGGLSELDKAGFIKRQLVETRQITKHVAQILDSRMNTKYDENDKLIREVKVITLKSKLVSDFRKDFQF |
| | YKVREINNYHHAHDAYLNAVVGTALIKKYPKLESEFVYGDYKVYDVRKMIAKSEQEIGKATAKYFFYSNIMNFFKTEITLA |
| | NGEIRKRPLIETNGETGEIVWDKGRDFATVRKVLSMPQVNIVKKTEVQTGGFSKESILPKRNSDKLIARKKDWDPKKYGGF |
| | DSPTVAYSVLVVAKVEKGKSKKLKSVKELLGITIMERSSFEKNPIDFLEAKGYKEVKKDLIIKLPKYSLFELENGRKRMLA |
| | SAGELQKGNELALPSKYVNFLYLASHYEKLKGSPEDNEQKQLFVEQHKHYLDEIIEQISEFSKRVILADANLDKVLSAYNK |
| | HRDKPIREQAENIIHLFTLTNLGAPAAFKYFDTTIDRKRYTSTKEVLDATLIHQSITGLYETRIDLSQLGGD (SEQ ID |
| | NO: 14) |
| SaCas9 | MGKRNYILGLDIGITSVGYGIIDYETRDVIDAGVRLFKEANVENNEGRRSKRGARRLKRRRRHRIQRVKKLLFDYNLLTDH |
| Staphylococcus | SELSGINPYEARVKGLSQKLSEEEFSAALLHLAKRRGVHNVNEVEEDTGNELSTKEQISRNSKALEEKYVAELQLERLKKD |
| aureus | GEVRGSINRFKTSDYVKEAKQLLKVQKAYHQLDQSFIDTYIDLLETRRTYYEGPGEGSPFGWKDIKEWYEMLMGHCTYFPE |
| | ELRSVKYAYNADLYNALNDLNNLVITRDENEKLEYYEKFQIIENVFKQKKKPTLKQIAKEILVNEEDIKGYRVTSTGKPEF |
| | TNLKVYHDIKDITARKEIIENAELLDQIAKILTIYQSSEDIQEELTNLNSELTQEEIEQISNLKGYTGTHNLSLKAINLIL |
| | DELWHTNDNQIAIFNRLKLVPKKVDLSQQKEIPTTLVDDFILSPVVKRSFIQSIKVINAIIKKYGLPNDIIIELAREKNSK |
| | DAQKMINEMQKRNRQTNERIEEIIRTTGKENAKYLIEKIKLHDMQEGKCLYSLEAIPLEDLLNNPFNYEVDHIIPRSVSFD |
| | NSFNNKVLVKQEENSKKGNRTPFQYLSSSDSKISYETFKKHILNLAKGKGRISKTKKEYLLEERDINRFSVQKDFINRNLV |
| | DTRYATRGLMNLLRSYFRVNNLDVKVKSINGGFTSFLRRKWKFKKERNKGYKHHAEDALIIANADFIFKEWKKLDKAKKVM |
| | ENQMFEEKQAESMPEIETEQEYKEIFITPHQIKHIKDFKDYKYSHRVDKKPNRKLINDTLYSTRKDDKGNTLIVNNLNGLY |
| | DKDNDKLKKLINKSPEKLLMYHHDPQTYQKLKLIMEQYGDEKNPLYKYYEETGNYLTKYSKKDNGPVIKKIKYYGNKLNAH |
| | LDITDDYPNSRNKVVKLSLKPYRFDVYLDNGVYKFVTVKNLDVIKKENYYEVNSKCYEEAKKLKKISNQAEFIASFYKNDL |
| | IKINGELYRVIGVNNDLLNRIEVNMIDITYREYLENMNDKRPPHIIKTIASKTQSIKKYSTDILGNLYEVKSKKHPQIIKK |
| | (SEQ ID NO: 15) |
| StCas9 | MLFNKCIIISINLDFSNKEKCMTKPYSIGLDIGTNSVGWAVITDNYKVPSKKMKVLGNTSKKYIKKNLLGVLLFDSGITAE |
| Streptococcus | GRRLKRTARRRYTRRRNRILYLQEIFSTEMATLDDAFFQRLDDSFLVPDDKRDSKYPIFGNLVEEKVYHDEFPTIYHLRKY |
| thermophilus | LADSTKKADLRLVYLALAHMIKYRGHFLIEGEFNSKNNDIQKNFQDFLDTYNAIFESDLSLENSKQLEEIVKDKISKLEKK |
| UniProtKB/S | DRILKLFPGEKNSGIFSEFLKLIVGNQADFRKCFNLDEKASLHFSKESYDEDLETLLGYIGDDYSDVFLKAKKLYDAILLS |
| wiss-Prot: | GFLTVTDNETEAPLSSAMIKRYNEHKEDLALLKEYIRNISLKTYNEVFKDDTKNGYAGYIDGKTNQEDFYVYLKNLLAEFE |
| G3ECR1.2 | GADYFLEKIDREDFLRKQRTFDNGSIPYQIHLQEMRAILDKQAKFYPFLAKNKERIEKILTFRIPYYVGPLARGNSDFAWS |
| Wild type | IRKRNEKITPWNFEDVIDKESSAEAFINRMTSFDLYLPEEKVLPKHSLLYETFNVYNELTKVRFIAESMRDYQFLDSKQKK |
| | DIVRLYFKDKRKVTDKDIIEYLHAIYGYDGIELKGIEKQFNSSLSTYHDLLNIINDKEFLDDSSNEAIIEEIIHTLTIFED |
| | REMIKQRLSKFENIFDKSVLKKLSRRHYTGWGKLSAKLINGIRDEKSGNTILDYLIDDGISNRNFMQLIHDDALSFKKKIQ |
| | KAQIIGDEDKGNIKEVVKSLPGSPAIKKGILQSIKIVDELVKVMGGRKPESIVVEMARENQYTNQGKSNSQQRLKRLEKSL |
| | KELGSKILKENIPAKLSKIDNNALQNDRLYLYYLQNGKDMYTGDDLDIDRLSNYDIDHIIPQAFLKDNSIDNKVLVSSASN |
| | RGKSDDFPSLEVVKKRKTFWYQLLKSKLISQRKFDNLTKAERGGLLPEDKAGFIQRQLVETRQITKHVARLLDEKFNNKKD |
| | ENNRAVRTVKIITLKSTLVSQFRKDFELYKVREINDFHHAHDAYLNAVIASALLKKYPKLEPEFVYGDYPKYNSFRERKSA |
| | TEKVYFYSNIMNIFKKSISLADGRVIERPLIEVNEETGESVWNKESDLATVRRVLSYPQVNVVKKVEEQNHGLDRGKPKGL |
| | FNANLSSKPKPNSNENLVGAKEYLDPKKYGGYAGISNSFAVLVKGTIEKGAKKKITNVLEFQGISILDRINYRKDKLNFLL |
| | EKGYKDIELIIELPKYSLFELSDGSRRMLASILSTNNKRGEIHKGNQIFLSQKFVKLLYHAKRISNTINENHRKYVENHKK |
| | EFEELFYYILEFNENYVGAKKNGKLLNSAFQSWQNHSIDELCSSFIGPTGSERKGLFELTSRGSAADFEFLGVKIPRYRDY |
| | TPSSLLKDATLIHQSVTGLYETRIDLAKLGEG (SEQ ID NO: 16) |
| LcCas 9 | MKIKNYNLALTPSTSAVGHVEVDDDLNILEPVHHQKAIGVAKFGEGETAEARRLARSARRTTKRRANRINHYFNEIMKPEI |
| Lactobacillus | DKVDPLMFDRIKQAGLSPLDERKEFRTVIFDRPNIASYYHNQFPTIWHLQKYLMITDEKADIRLIYWALHSLLKHRGHFFN |
| crispatus | TTPMSQFKPGKLNLKDDMLALDDYNDLEGLSFAVANSPEIEKVIKDRSMHKKEKIAELKKLIVNDVPDKDLAKRNNKIITQ |
| NCBI | IVNAIMGNSFHLNFIFDMDLDKLTSKAWSFKLDDPELDTKFDAISGSMTDNQIGIFETLQKIYSAISLLDILNGSSNVVDA |
| Reference | KNALYDKHKRDLNLYFKFLNTLPDEIAKTLKAGYTLYIGNRKKDLLAARKLLKVNVAKNFSQDDFYKLINKELKSIDKQGL |
| Sequence: | QTRFSEKVGELVAQNNFLPVQRSSDNVFIPYQLNAITFNKILENQGKYYDFLVKPNPAKKDRKNAPYELSQLMQFTIPYYV |
| WP_133478044.1 | GPLVTPEEQVKSGIPKTSRFAWMVRKDNGAITPWNFYDKVDIEATADKFIKRSIAKDSYLLSELVLPKHSLLYEKYEVFNE |
| Wild type | LSNVSLDGKKLSGGVKQILFNEVFKKTNKVNTSRILKALAKHNIPGSKITGLSNPEEFTSSLQTYNAWKKYFPNQIDNFAY |
| | QQDLEKMIEWSTVFEDHKILAKKLDEIEWLDDDQKKFVANTRLRGWGRLSKRLLTGLKDNYGKSIMQRLETTKANFQQIVY |
| | KPEFREQIDKISQAAAKNQSLEDILANSYTSPSNRKAIRKTMSVVDEYIKLNHGKEPDKIFLMFQRSEQEKGKQTEARSKQ |
| | LNRILSQLKADKSANKLFSKQLADEFSNAIKKSKYKLNDKQYFYFQQLGRDALTGEVIDYDELYKYTVLHIIPRSKLTDDS |
| | QNNKVLTKYKIVDGSVALKFGNSYSDALGMPIKAFWTELNRLKLIPKGKLLNLTTDFSTLNKYQRDGYIARQLVETQQIVK |
| | LLATIMQSRFKHTKIIEVRNSQVANIRYQFDYFRIKNLNEYYRGFDAYLAAVVGTYLYKVYPKARRLFVYGQYLKPKKTNQ |
| | ENQDMHLDSEKKSQGFNFLWNLLYGKQDQIFVNGTDVIAFNRKDLITKMNTVYNYKSQKISLAIDYHNGAMFKATLFPRND |
| | RDTAKTRKLIPKKKDYDTDIYGGYTSNVDGYMLLAEIIKRDGNKQYGFYGVPSRLVSELDTLKKTRYTEYEEKLKEIIKPE |
| | LGVDLKKIKKIKILKNKVPFNQVIIDKGSKFFITSTSYRWNYRQLILSAESQQTLMDLVVDPDFSNHKARKDARKNADERL |
| | IKVYEEILYQVKNYMPMFVELHRCYEKLVDAQKTFKSLKISDKAMVLNQILILLHSNATSPVLEKLGYHTRFTLGKKHNLI |
| | SENAVLVTQSITGLKENHVSIKQML (SEQ ID NO: 17) |
| PdCas9 | MTNEKYSIGLDIGTSSIGFAVVNDNNRVIRVKGKNAIGVRLFDEGKAAADRRSFRTTRRSFRTTRRRLSRRRWRLKLLREI |
| Pedicoccus | FDAY1TPVDEAFF1RLKESNLSPKDSKKQYSGD1LFNDRSDKDFYEKYPT1YHLRNALMTEHRKFDVRE1YLA1HH1MKFR |
| damnosus | GHFLNATPANNFKVGRLNLEEKFEELNDIYQRVFPDESIEFRTDNLEQIKEVLLDNKRSRADRQRTLVSDIYQSSEDKDIE |
| NCBI | KRNKAVATEILKASLGNKAKLNVITNVEVDKEAAKEWSITFDSESIDDDLAKIEGQMTDDGHEIIEVLRSLYSGITLSAIV |
| Reference | PENHTLSQSMVAKYDLHKDHLKLFKKLINGMTDTKKAKNLRAAYDGYIDGVKGKVLPQEDFYKQVQVNLDDSAEANEIQTY |
| Sequence: | IDQDIFMPKQRTKANGSIPHQLQQQELDQIIENQKAYYPWLAELNPNPDKKRQQLAKYKLDELVTFRVPYYVGPMITAKDQ |
| WP_062913273.1 | KNQSGAEFAWMIRKEPGNITPWNFDQKVDRMATANQFIKRMTTTDTYLLGEDVLPAQSLLYQKFEVLNELNKIRIDHKPIS |
| Wild type | IEQKQQIFNDLFKQFKNVTIKHLQDYLVSQGQYSKRPLIEGLADEKRFNSSLSTYSDLCGIFGAKLVEENDRQEDLEKIIE |
| | WSTIFEDKKIYRAKLNDLTWLTDDQKEKLATKRYQGWGRLSRKLLVGLKNSEHRNIMDILWITNENFMQIQAEPDFAKLVT |
| | DANKGMLEKTDSQDVINDLYTSPQNKKAIRQILLVVHDIQNAMHGQAPAKIHVEFARGEERNPRRSVQRQRQVEAAYEKVS |
| | NELVSAKVRQEFKEAINNKRDFKDRLFLYFMQGGIDIYTGKQLNIDQLSSYQIDHILPQAFVKDDSLTNRVLTNENQVKAD |
| | SVPIDIFGKKMLSVWGRMKDQGLISKGKYRNLTMNPENISAHTENGFINRQLVETRQVIKLAVNILADEYGDSTQIISVKA |
| | DLSHQMREDFELLKNRDVNDYHHAFDAYLAAFIGNYLLKRYPKLESYFVYGDFKKFTQKETKMRRFNFIYDLKHCDQVVNK |
| | ETGEILWTKDEDIKYIRHLFAYKKILVSHEVREKRGALYNQTIYKAKDDKGSGQESKKLIRIKDDKETKIYGGYSGKSLAY |
| | MTIVQITKKNKVSYRVIGIPTLALARLNKLENDSTENNGELYKIIKPQFTHYKVDKKNGEIIETTDDFKIVVSKVRFQQLI |
| | DDAGQFFMLASDTYKNNAQQLVISNNALKAINNTNITDCPRDDLERLDNLRLDSAFDEIVKKMDKYFSAYDANNFREKIRN |
| | SNLIFYQLPVEDQWENNKITELGKRTVLTRILQGLHANATTTDMSIFKIKTPFGQLRQRSGISLSENAQLIYQSPTGLFER |
| | RVQLNKIK (SEQ ID NO: 18) |
| FnCas9 | MKKQKFSDYYLGFDIGTNSVGWCVTDLDYNVLRFNKKDMWGSRLFEEAKTAAERRVQRNSRRRLKRRKWRLNLLEEIFSNE |
| Fusobaterium | ILKIDSNFFRRLKESSLWLEDKSSKEKFTLFNDDNYKDYDFYKQYPTIFHLRNELIKNPEKKDIRLVYLAIHSIFKSRGHF |
| nucleatum | LFEGQNLKEIKNFETLYNNLIAFLEDNGINKIIDKNNIEKLEKIVCDSKKGLKDKEKEFKEIFNSDKQLVAIFKLSVGSSV |
| NCBI | SLNDLFDTDEYKKGEVEKEKISFREQIYEDDKPIYYSILGEKIELLDIAKTFYDFMVLNNILADSQYISEAKVKLYEEHKK |
| Reference | DLKNLKYIIRKYNKGNYDKLFKDKNENNYSAYIGLNKEKSKKEVIEKSRLKIDDLIKNIKGYLPKVEEIEEKDKAIFNKIL |
| Sequence: | NKIELKTILPKQRISDNGTLPYQIHEAELEKILENQSKYYDFLNYEENGIITKDKLLMTFKFRIPYYVGPLNSYHKDKGGN |
| WP_060798984.1 | SWIVRKEEGKILPWNFEQKVDIEKSAEEFIKRMTNKCTYLNGEDVIPKDTFLYSEYVILNELNKVQVNDEFLNEENKRKII |
| | DELFKENKKVSEKKFKEYLLVKQIVDGTIELKGVKDSFNSNYISYIRFKDIFGEKLNLDIYKEISEKSILWKCLYGDDKKI |
| | FEKKIKNEYGDILTKDEIKKINTFKFNNWGRLSEKLLTGIEFINLETGECYSSVMDALRRTNYNLMELLSSKFTLQESINN |
| | ENKEMNEASYRDLIEESYVSPSLKRAIFQTLKIYEEIRKITGRVPKKVFIEMARGGDESMKNKKIPARQEQLKKLYDSCGN |
| | DIANFSIDIKEMKNSLISYDNNSLRQKKLYLYYLQFGKCMYTGREIDLDRLLQNNDTYDIDHIYPRSKVIKDDSFDNLVLV |
| | LKNENAEKSNEYPVKKEIQEKMKSFWRFLKEKNFISDEKYKRLTGKDDFELRGFMARQLVNVRQTTKEVGKILQQIEPEIK |
| | IVYSKAEIASSFREMFDFIKVRELNDTHHAKDAYLNIVAGNVYNTKFTEKPYRYLQEIKENYDVKKIYNYDIKNAWDKENS |
| | LEIVKKNMEKNTVNITRFIKEKKGQLFDLNPIKKGETSNEIISIKPKVYNGKDDKLNEKYGYYKSLNPAYFLYVEHKEKNK |
| | RIKSFERVNLVDVNNIKDEKSLVKYLIENKKLVEPRVIKKVYKRQVILINDYPYSIVTLDSNKLMDFENLKPLFLENKYEK |
| | ILKNVIKFLEDNQGKSEENYKFIYLKKKDRYEKNETLESVKDRYNLEFNEMYDKFLEKLDSKDYKNYMNNKKYQELLDVKE |
| | KFIKLNLFDKAFTLKSFLDLFNRKTMADFSKVGLTKYLGKIQKISSNVLSKNELYLLEESVTGLFVKKIKL (SEQ ID |
| | NO: 19) |
| EcCas9 | MNKYYLGLDMGSASVGWAVTDENYHLVRRKGKDLWGVRTFDVAQTAKERRITRGNRRRQDRRKQRIQILQELLGEEVLKTD |
| Enterococcus | PGFFHRMKESRYVVEDKRTLDGKQVELPYALFVDKDYTDKEYYKQFPTINHLIVYLMTTSDTPDIRLVYLALHYYMKNRGN |
| cecorum | FLHSGDINNVKDINDILEQLDNVLETFLDGWNLKLKSYVEDIKNIYNRDLGRGERKKAFVNTLGAKTKAEKAFCSLISGGS |
| NCBI | TNLAELFDDSSLKEIETPKIEFASSSLEDKIDGIQEALEDRFAVIEAAKRLYDWKTLTDILGDSSSLAEARVNSYQMHHEQ |
| Reference | LLELKSLVKEYLDRKVFQEVFVSLNVANNYPAYIGHTKINGKKKELEVKRTKRNDFYSYVKKQVIEPIKKKVSDEAVLTKL |
| Sequence: | SEIESLIEVDKYLPLQVNSDNGVIPYQVKLNELTRIFDNLENRIPVLRENRDKIIKTFKFRIPYYVGSLNGVVKNGKCTNW |
| WP_04733850 | MVRKEEGKIYPWNFEDKVDLEASAEQFIRRMTNKCTYLVNEDVLPKYSLLYSKYLVLSELNNLRIDGRPLDVKIKQDIYEN |
| 1.1 | VFKKNRKVTLKKIKKYLLKEGIITDDDELSGLADDVKSSLTAYRDFKEKLGHLDLSEAQMENIILNITLFGDDKKLLKKRL |
| Wild type | AALYPFIDDKSLNRIATLNYRDWGRLSERFLSGITSVDQETGELRTIIQCMYETQANLMQLLAEPYHFVEAIEKENPKVDL |
| | ESISYRIVNDLYVSPAVKRQIWQTLLVIKDIKQVMKHDPERIFIEMAREKQESKKTKSRKQVLSEVYKKAKEYEHLFEKLN |
| | SLTEEQLRSKKIYLYFTQLGKCMYSGEPIDFENLVSANSNYDIDHIYPQSKTIDDSFNNIVLVKKSLNAYKSNHYPIDKNI |
| | RDNEKVKTLWNTLVSKGLITKEKYERLIRSTPFSDEELAGFIARQLVETRQSTKAVAEILSNWFPESEIVYSKAKNVSNFR |
| | QDFEILKVRELNDCHHAHDAYLNIVVGNAYHTKFTNSPYRFIKNKANQEYNLRKLLQKVNKIESNGVVAWVGQSENNPGTI |
| | ATVKKVIRRNTVLISRMVKEVDGQLFDLTLMKKGKGQVPIKSSDERLTDISKYGGYNKATGAYFTFVKSKKRGKVVRSFEY |
| | VPLHLSKQFENNNELLKEYIEKDRGLTDVEILIPKVLINSLFRYNGSLVRITGRGDTRLLLVHEQPLYVSNSFVQQLKSVS |
| | SYKLKKSENDNAKLTKTATEKLSNIDELYDGLLRKLDLPIYSYWFSSIKEYLVESRTKYIKLSIEEKALVIFEILHLFQSD |
| | AQVPNLKILGLSTKPSRIRIQKNLKDTDKMSIIHQSPSGIFEHEIELTSL (SEQ ID NO: 20) |
| AhCas9 | MQNGFLGITVSSEQVGWAVTNPKYELERASRKDLWGVRLFDKAETAEDRRMFRTNRRLNQRKKNRIHYLRDIFHEEVNQKD |
| Anaerostipes | PNFFQQLDESNFCEDDRTVEFNFDTNLYKNQFPTVYHLRKYLMETKDKPDIRLVYLAFSKFMKNRGHFLYKGNLGEVMDFE |
| hadrus | NSMKGFCESLEKFNIDFPTLSDEQVKEVRDILCDHKIAKTVKKKNIITITKVKSKTAKAWIGLFCGCSVPVKVLFQDIDEE |
| NCBI | IVTDPEKISFEDASYDDYIANIEKGVGIYYEAIVSAKMLFDWSILNEILGDHQLLSDAMIAEYNKHHDDLKRLQKIIKGTG |
| Reference | SRELYQDIFINDVSGNYVCYVGHAKTMSSADQKQFYTFLKNRLKNVNGISSEDAEWIDTEIKNGTLLPKQTKRDNSVIPHQ |
| Sequence: | LQLREFELILDNMQEMYPFLKENREKLLKIFNFVIPYYVGPLKGVVRKGESTNWMVPKKDGVIHPWNFDEMVDKEASAECF |
| WP_044924278.1 | ISRMTGNCSYLFNEKVLPKNSLLYETFEVLNELNPLKINGEPISVELKQRIYEQLFLTGKKVTKKSLTKYLIKNGYDKDIE |
| Wild type | LSGIDNEFHSNLKSHIDFEDYDNLSDEEVEQIILRITVFEDKQLLKDYLNREFVKLSEDERKQICSLSYKGWGNLSEMLLN |
| | GITVTDSNGVEVSVMDMLWNTNLNLMQILSKKYGYKAEIEHYNKEHEKTIYNREDLMDYLNIPPAQRRKVNQLITIVKSLK |
| | KTYGVPNKIFFKISREHQDDPKRTSSRKEQLKYLYKSLKSEDEKHLMKELDELNDHELSNDKVYLYFLQKGRCIYSGKKLN |
| | LSRLRKSNYQNDIDYIYPLSAVNDRSMNNKVLTGIQENRADKYTYFPVDSEIQKKMKGFWMELVLQGFMTKEKYFRLSREN |
| | DFSKSELVSFIEREISDNQQSGRMIASVLQYYFPESKIVFVKEKLISSFKRDFHLISSYGHNHLQAAKDAYITIVVGNVYH |
| | TKFTMDPAIYFKNHKRKDYDLNRLFLENISRDGQIAWESGPYGSIQTVRKEYAQNHIAVTKRVVEVKGGLFKQMPLKKGHG |
| | EYPLKTNDPRFGNIAQYGGYTNVTGSYFVLVESMEKGKKRISLEYVPVYLHERLEDDPGHKLLKEYLVDHRKLNHPKILLA |
| | KVRKNSLLKIDGFYYRLNGRSGNALILTNAVELIMDDWQTKTANKISGYMKRRAIDKKARVYQNEFHIQELEQLYDFYLDK |
| | LKNGVYKNRKNNQAELIHNEKEQFMELKTEDQCVLLTEIKKLFVCSPMQADLTLIGGSKHTGMIAMSSNVTKADFAVIAED |
| | PLGLRNKVIYSHKGEK (SEQ ID NO: 21) |
| KvCas 9 | MSQNNNKIYNIGLDIGDASVGWAVVDEHYNLLKRHGKHMWGSRLFTQANTAVERRSSRSTRRRYNKRRERIRLLREIMEDM |
| Kandleria | VLDVDPTFFIRLANVSFLDQEDKKDYLKENYHSNYNLFIDKDFNDKTYYDKYPTIYHLRKHLCESKEKEDPRLIYLALHHI |
| vitulina | VKYRGNFLYEGQKFSMDVSNIEDKMIDVLRQFNEINLFEYVEDRKKIDEVLNVLKEPLSKKHKAEKAFALFDTTKDNKAAY |
| NCBI | KELCAALAGNKFNVTKMLKEAELHDEDEKDISFKFSDATFDDAFVEKQPLLGDCVEFIDLLHDIYSWVELQNILGSAHTSE |
| Reference | PSISAAMIQRYEDHKNDLKLLKDVIRKYLPKKYFEVFRDEKSKKNNYCNYINHPSKTPVDEFYKYIKKLIEKIDDPDVKTI |
| Sequence: | LNKIELESFMLKQNSRTNGAVPYQMQLDELNKILENQSVYYSDLKDNEDKIRSILTFRIPYYFGPLNITKDRQFDWIIKKE |
| WP_031589969.1 | GKENERILPWNANEIVDVDKTADEFIKRMRNFCTYFPDEPVMAKNSLTVSKYEVLNEINKLRINDHLIKRDMKDKMLHTLF |
| Wild type | MDHKSISANAMKKWLVKNQYFSNTDDIKIEGFQKENACSTSLTPWIDFTKIFGKINESNYDFIEKIIYDVTVFEDKKILRR |
| | RLKKEYDLDEEKIKKILKLKYSGWSRLSKKLLSGIKTKYKDSTRTPETVLEVMERTNMNLMQVINDEKLGFKKTIDDANST |
| | SVSGKFSYAEVQELAGSPAIKRGIWQALLIVDEIKKIMKHEPAHVYIEFARNEDEKERKDSFVNQMLKLYKDYDFEDETEK |
| | EANKHLKGEDAKSKIRSERLKLYYTQMGKCMYTGKSLDIDRLDTYQVDHIVPQSLLKDDSIDNKVLVLSSENQRKLDDLVI |
| | PSSIRNKMYGFWEKLFNNKIISPKKFYSLIKTEFNEKDQERFINRQIVETRQITKHVAQIIDNHYENTKVVTVRADLSHQF |
| | RERYHIYKNRDINDFHHAHDAYIATILGTYIGHRFESLDAKYIYGEYKRIFRNQKNKGKEMKKNNDGFILNSMRNIYADKD |
| | TGEIVWDPNYIDRIKKCFYYKDCFVTKKLEENNGTFFNVTVLPNDTNSDKDNTLATVPVNKYRSNVNKYGGFSGVNSFIVA |
| | IKGKKKKGKKVIEVNKLTGIPLMYKNADEEIKINYLKQAEDLEEVQIGKEILKNQLIEKDGGLYYIVAPTEIINAKQLILN |
| | ESQTKLVCEIYKAMKYKNYDNLDSEKIIDLYRLLINKMELYYPEYRKQLVKKFEDRYEQLKVISIEEKCNIIKQILATLHC |
| | NSSIGKIMYSDFKISTTIGRLNGRTISLDDISFIAESPTGMYSKKYKL (SEQ ID NO: 22) |
| EfCas9 | MRLFEEGHTAEDRRLKRTARRRISRRRNRLRYLQAFFEEAMTDLDENFFARLQESFLVPEDKKWHRHPIFAKLEDEVAYHE |
| Enterococcus | TYPTIYHLRKKLADSSEQADLRLIYLALAHIVKYRGHFLIEGKLSTENTSVKDQFQQFMVIYNQTFVNGESRLVSAPLPES |
| faecalis | VLIEEELTEKASRTKKSEKVLQQFPQEKANGLFGQFLKLMVGNKADFKKVFGLEEEAKITYASESYEEDLEGILAKVGDEY |
| NCBI | SDVFLAAKNVYDAVELSTILADSDKKSHAKLSSSMIVRFTEHQEDLKKFKRFIRENCPDEYDNLFKNEQKDGYAGYIAHAG |
| Reference | KVSQLKFYQYVKKIIQDIAGAEYFLEKIAQENFLRKQRTFDNGVIPHQIHLAELQAIIHRQAAYYPFLKENQEKIEQLVTF |
| Sequence: | RIPYYVGPLSKGDASTFAWLKRQSEEPIRPWNLQETVDLDQSATAFIERMTNFDTYLPSEKVLPKHSLLYEKFMVFNELTK |
| WP_01663104 | ISYTDDRGIKANFSGKEKEKIFDYLFKTRRKVKKKDIIQFYRNEYNTEIVTLSGLEEDQFNASFSTYQDLLKCGLTRAELD |
| 4.1 | HPDNAEKLEDIIKILTIFEDRQRIRTQLSTFKGQFSAEVLKKLERKHYTGWGRLSKKLINGIYDKESGKTILDYLVKDDGV |
| Wild type | SKHYNRNFMQLINDSQLSFKNAIQKAQSSEHEETLSETVNELAGSPAIKKGIYQSLKIVDELVAIMGYAPKRIVVEMAREN |
| | QTTSTGKRRSIQRLKIVEKAMAEIGSNLLKEQPTTNEQLRDTRLFLYYMQNGKDMYTGDELSLHRLSHYDIDHIIPQSFMK |
| | DDSLDNLVLVGSTENRGKSDDVPSKEVVKDMKAYWEKLYAAGLISQRKFQRLTKGEQGGLTLEDKAHFIQRQLVETRQITK |
| | NVAGILDQRYNAKSKEKKVQIITLKASLTSQFRSIFGLYKVREVNDYHHGQDAYLNCVVATTLLKVYPNLAPEFVYGEYPK |
| | FQTFKENKATAKAIIYTNLLRFFTEDEPRFTKDGEILWSNSYLKTIKKELNYHQMNIVKKVEVQKGGFSKESIKPKGPSNK |
| | LIPVKNGLDPQKYGGFDSPVVAYTVLFTHEKGKKPLIKQEILGITIMEKTRFEQNPILFLEEKGFLRPRVLMKLPKYTLYE |
| | FPEGRRRLLASAKEAQKGNQMVLPEHLLTLLYHAKQCLLPNQSESLAYVEQHQPEFQEILERVVDFAEVHTLAKSKVQQIV |
| | KLFEANQTADVKEIAASFIQLMQFNAMGAPSTFKFFQKDIERARYTSIKEIFDATIIYQSPTGLYETRRKVVD (SEQ ID |
| | NO: 23) |
| Staphylococcus | KRNYILGLDIGITSVGYGIIDYETRDVIDAGVRLFKEANVENNEGRRSKRGARRLKRRRRHRIQRVKKLLFDYNLLTDHSE |
| aureus | LSGINPYEARVKGLSQKLSEEEFSAALLHLAKRRGVHNVNEVEEDTGNELSTKEQISRNSKALEEKYVAELQLERLKKDGE |
| Cas9 | VRGSINRFKTSDYVKEAKQLLKVQKAYHQLDQSFIDTYIDLLETRRTYYEGPGEGSPFGWKDIKEWYEMLMGHCTYFPEEL |
| | RSVKYAYNADLYNALNDLNNLVITRDENEKLEYYEKFQIIENVFKQKKKPTLKQIAKEILVNEEDIKGYRVTSTGKPEFTN |
| | LKVYHDIKDITARKEIIENAELLDQIAKILTIYQSSEDIQEELTNLNSELTQEEIEQISNLKGYTGTHNLSLKAINLILDE |
| | LWHTNDNQIAIFNRLKLVPKKVDLSQQKEIPTTLVDDFILSPVVKRSFIQSIKVINAIIKKYGLPNDIIIELAREKNSKDA |
| | QKMINEMQKRNRQTNERIEEIIRTTGKENAKYLIEKIKLHDMQEGKCLYSLEAIPLEDLLNNPFNYEVDHIIPRSVSFDNS |
| | FNNKVLVKQEENSKKGNRTPFQYLSSSDSKISYETFKKHILNLAKGKGRISKTKKEYLLEERDINRFSVQKDFINRNLVDT |
| | RYATRGLMNLLRSYFRVNNLDVKVKSINGGFTSFLRRKWKFKKERNKGYKHHAEDALIIANADFIFKEWKKLDKAKKVMEN |
| | QMFEEKQAESMPEIETEQEYKEIFITPHQIKHIKDFKDYKYSHRVDKKPNRELINDTLYSTRKDDKGNTLIVNNLNGLYDK |
| | DNDKLKKLINKSPEKLLMYHHDPQTYQKLKLIMEQYGDEKNPLYKYYEETGNYLTKYSKKDNGPVIKKIKYYGNKLNAHLD |
| | ITDDYPNSRNKVVKLSLKPYRFDVYLDNGVYKFVTVKNLDVIKKENYYEVNSKCYEEAKKLKKISNQAEFIASFYNNDLIK |
| | INGELYRVIGVNNDLLNRIEVNMIDITYREYLENMNDKRPPRIIKTIASKTQSIKKYSTDILGNLYEVKSKKHPQIIKKG |
| | (SEQ ID NO: 24) |
| Geobacillus | MKYKIGLDIGITSIGWAVINLDIPRIEDLGVRIFDRAENPKTGESLALPRRLARSARRRLRRRKHRLERIRRLFVREGILT |
| thermodenit | KEELNKLFEKKHEIDVWQLRVEALDRKLNNDELARILLHLAKRRGFRSNRKSERTNKENSTMLKHIEENQSILSSYRTVAE |
| riflcans | MVVKDPKFSLHKRNKEDNYTNTVARDDLEREIKLIFAKQREYGNIVCTEAFEHEYISIWASQRPFASKDDIEKKVGFCTFE |
| Cas9 | PKEKRAPKATYTFQSFTVWEHINKLRLVSPGGIRALTDDERRLIYKQAFHKNKITFHDVRTLLNLPDDTRFKGLLYDRNTT |
| | LKENEKVRFLELGAYHKIRKAIDSVYGKGAAKSFRPIDFDTFGYALTMFKDDTDIRSYLRNEYEQNGKRMENLADKVYDEE |
| | LIEELLNLSFSKFGHLSLKALRNILPYMEQGEVYSTACERAGYTFTGPKKKQKTVLLPNIPPIANPVVMRALTQARKVVNA |
| | IIKKYGSPVSIHIELARELSQSFDERRKMQKEQEGNRKKNETAIRQLVEYGLTLNPTGLDIVKFKLWSEQNGKCAYSLQPI |
| | EIERLLEPGYTEVDHVIPYSRSLDDSYTNKVLVLTKENREKGNRTPAEYLGLGSERWQQFETFVLTNKQFSKKKRDRLLRL |
| | HYDENEENEFKNRNLNDTRYISRFLANFIREHLKFADSDDKQKVYTVNGRITAHLRSRWNFNKNREESNLHHAVDAAIVAC |
| | TTPSDIARVTAFYQRREQNKELSKKTDPQFPQPWPHFADELQARLSKNPKESIKALNLGNYDNEKLESLQPVFVSRMPKRS |
| | ITGAAHQETLRRYIGIDERSGKIQTVVKKKLSEIQLDKTGHFPMYGKESDPRTYEAIRQRLLEHNNDPKKAFQEPLYKPKK |
| | NGELGPIIRTIKIIDTTNQVIPLNDGKTVAYNSNIVRVDVFEKDGKYYCVPIYTIDMMKGILPNKAIEPNKPYSEWKEMTE |
| | DYTFRFSLYPNDLIRIEFPREKTIKTAVGEEIKIKDLFAYYQTIDSSNGGLSLVSHDNNFSLRSIGSRTLKRFEKYQVDVL |
| | GNIYKVRGEKRVGVASSSHSKAGETIRPL |
| | (SEQ ID NO: 25) |
| ScCas9 | MEKKYSIGLDIGTNSVGWAVITDDYKVPSKKFKVLGNTNRKSIKKNLMGALLFDSGETAEATRLKRTARRRYTRRKNRIRY |
| S. canis | LQEIFANEMAKLDDSFFQRLEESFLVEEDKKNERHPIFGNLADEVAYHRNYPTIYHLRKKLADSPEKADLRLIYLALAHII |
| 1375 AA | LALGLTPNFKSNFDLTEDAKLQLSKDTYDDDLDELLGQIGDQYADLFSAAKNLSDAILLSDILRSNSEVTKAPLSASMVKR |
| 159.2 kDa | YDEHHQDLALLKTLVRQQFPEKYAEIFKDDTKNGYAGYVGIGIKHRKRTTKLATQEEFYKFIKPILEKMDGAEELLAKLNR |
| | DDLLRKQRTFDNGSIPHQIHLKELHAILRRQEEFYPFLKENREKIEKILTFRIPYYVGPLARGNSRFAWLTRKSEEAITPW |
| | NFEEVVDKGASAQSFIERMTNFDEQLPNKKVLPKHSLLYEYFTVYNELTKVKYVTERMRKPEFLSGEQKKAIVDLLFKTNR |
| | KVTVKQLKEDYFKKIECFDSVEIIGVEDRFNASLGTYHDLLKIIKDKDFLDNEENEDILEDIVLTLTLFEDREMIEERLKT |
| | YAHLFDDKVMKQLKRRHYTGWGRLSRKMINGIRDKQSGKTILDFLKSDGFSNRNFMQLIHDDSLTFKEEIEKAQVSGQGDS |
| | LHEQIADLAGSPAIKKGILQTVKIVDELVKVMGHKPENIVIEMARENQTTTKGLQQSRERKKRIEEGIKELESQILKENPV |
| | ENTQLQNEKLYLYYLQNGRDMYVDQELDINRLSDYDVDHIVPQSFIKDDSIDNKVLTRSVENRGKSDNVPSEEVVKKMKNY |
| | WRQLLNAKLITQRKFDNLTKAERGGLSEADKAGFIKRQLVETRQITKHVARILDSRMNTKRDKNDKPIREVKVITLKSKLV |
| | SDFRKDFQLYKVRDINNYHHAHDAYLNAVVGTALIKKYPKLESEFVYGDYKVYDVRKMIAKSEQEIGKATAKRFFYSNIMN |
| | FFKTEVKLANGEIRKRPLIETNGETGEVVWNKEKDFATVRKVLAMPQVNIVKKTEVQTGGFSKESILSKRESAKLIPRKKG |
| | WDTRKYGGFGSPTVAYSILVVAKVEKGKAKKLKSVKVLVGITIMEKGSYEKDPIGFLEAKGYKDIKKELIFKLPKYSLFEL |
| | ENGRRRMLASATELQKANELVLPQHLVRLLYYTQNISATTGSNNLGYIEQHREEFKEIFEKIIDFSEKYILKNKVNSNLKS |
| | SFDEQFAVSDSILLSNSFVSLLKYTSFGASGGFTFLDLDVKQGRLRYQTVTEVLDATLIYQSITGLYETRTDLSQLGGD |
| | (SEQ ID NO: 26) |

[0192] The base editors described herein may include any of the above Cas9 ortholog sequences, or any variants thereof having at least 80%, at least 85%, at least 90%, at least 95%, or at least 99% sequence identity thereto.

[0193] The napDNAbp may include any suitable homologs and/or orthologs or naturally occurring enzymes, such as, Cas9. Cas9 homologs and/or orthologs have been described in various species, including, but not limited to, S. pyogenes and S. thermophilus. Preferably, the Cas moiety is configured (e.g, mutagenized, recombinantly engineered, or otherwise obtained from nature) as a nickase, i.e., capable of cleaving only a single strand of the target double-stranded DNA. Additional suitable Cas9 nucleases and sequences will be apparent to those of skill in the art based on this disclosure, and such Cas9 nucleases and sequences include Cas9 sequences from the organisms and loci disclosed in Chylinski, Rhun, and Charpentier, “The tracrRNA and Cas9 families of type II CRISPR-Cas immunity systems” (2013) RNA Biology 10:5, 726-737; the entire contents of which are incorporated herein by reference. In some embodiments, a Cas9 nuclease has an inactive (e.g., an inactivated) DNA cleavage domain; that is, the Cas9 is a nickase. In some embodiments, the Cas9 protein comprises an amino acid sequence that is at least 80% identical to the amino acid sequence of a Cas9 protein as provided by any one of the variants of Table 3. In some embodiments, the Cas9 protein comprises an amino acid sequence that is at least 85%, at least 90%, at least 92%, at least 95%, at least 96%, at least 97%, at least 98%, at least 99%, or at least 99.5% identical to the amino acid sequence of a Cas9 protein as provided by any one of the Cas9 orthologs in the above tables.

### (3) Dead Cas9 Variant

[0194] In certain embodiments, the base editors described herein may include a dead Cas9, e.g., dead SpCas9, which has no nuclease activity due to one or more mutations that inactive both nuclease domains of Cas9, namely the RuvC domain (which cleaves the non-protospacer DNA strand) and HNH domain (which cleaves the protospacer DNA strand). The nuclease inactivation may be due to one or mutations that result in one or more substitutions and/or deletions in the amino acid sequence of the encoded protein, or any variants thereof having at least 80%, at least 85%, at least 90%, at least 95%, or at least 99% sequence identity thereto.

[0195] As used herein, the term “dCas9” refers to a nuclease-inactive Cas9 or nuclease-dead Cas9, or a functional fragment thereof, and embraces any naturally occurring dCas9 from any organism, any naturally-occurring dCas9 equivalent or functional fragment thereof, any dCas9 homolog, ortholog, or paralog from any organism, and any mutant or variant of a dCas9, naturally-occurring or engineered. The term dCas9 is not meant to be particularly limiting and may be referred to as a “dCas9 or equivalent.” Exemplary dCas9 proteins and method for making dCas9 proteins are further described herein and/or are described in the art and are incorporated herein by reference.

[0196] In other embodiments, dCas9 corresponds to, or comprises in part or in whole, a Cas9 amino acid sequence having one or more mutations that inactivate the Cas9 nuclease activity. In other embodiments, Cas9 variants having mutations other than D10A and H840A are provided which may result in the full or partial inactivation of the endogenous Cas9 nuclease activity (e.g., nCas9 or dCas9, respectively). Such mutations, by way of example, include other amino acid substitutions at D10 and H840, or other substitutions within the nuclease domains of Cas9 (e.g., substitutions in the HNH nuclease subdomain and/or the RuvC1 subdomain) with reference to a wild type sequence such as Cas9 from Streptococcus pyogenes (NCBI Reference Sequence: NC_017053.1). In some embodiments, variants or homologues of Cas9 (e.g., variants of Cas9 from Streptococcus pyogenes (NCBI Reference Sequence: NC_017053.1)) are provided which are at least about 70% identical, at least about 80% identical, at least about 90% identical, at least about 95% identical, at least about 98% identical, at least about 99% identical, at least about 99.5% identical, or at least about 99.9% identical to NCBI Reference Sequence: NC_017053.1. In some embodiments, variants of dCas9 (e.g., variants of NCBI Reference Sequence: NC_017053.1) are provided having amino acid sequences which are shorter, or longer than NC_017053.1 by about 5 amino acids, by about 10 amino acids, by about 15 amino acids, by about 20 amino acids, by about 25 amino acids, by about 30 amino acids, by about 40 amino acids, by about 50 amino acids, by about 75 amino acids, by about 100 amino acids or more.

[0197] In one embodiment, the dead Cas9 may be based on the canonical SpCas9 sequence of Q99ZW2 and may have the following sequence, which comprises a DIOX and an H810X, wherein X may be any amino acid, substitutions (underlined and bolded), or a variant be variant of SEQ ID NO: 40 having at least 80%, at least 85%, at least 90%, at least 95%, or at least 99% sequence identity thereto.

[0198] In one embodiment, the dead Cas9 may be based on the canonical SpCas9 sequence of Q99ZW2 and may have the following sequence, which comprises a D10A and an H810A substitutions (underlined and bolded), or may be a variant of SEQ ID NO: 27 having at least 80%, at least 85%, at least 90%, at least 95% or at least 99% sequence identity thereto:

| | | SEQ |
|---|---|---|
| Description | Sequence | ID NO: |
| dead Cas9 or | MDKKYSIGLXIGTNSVGWAVITDEYKVPSKKFKVLGNTDRHSIKKNLIGALLFDSGETA | 27 |
| dCas9 | FGNIVDEVAYHEKYPTIYHLRKKLVDSTDKADLRLIYLALAHMIKFRGHFLIEGDLNPD | |
| Streptococcus | NSDVDKLFIQLVOTYNQLFEENPINASGVDAKAILSARLSKSRRLENLIAQLPGEKKNG | |
| pyogenes | LFGNLIALSLGLTPNFKSNFDLAEDAKLQLSKDTYDDDLDNLLAQIGDQYADLFLAAKN | |
| Q99ZW2 Cas9 | LSDAILLSDILRVNTEITKAPLSASMIKRYDEHHQDLTLLKALVRQQLPEKYKEIFFDQ | |
| with D10X | SKNGYAGYIDGGASQEEFYKFIKPILEKMDGTEELLVKLNREDLLRKQRTFDNGSIPHQ | |
| and H810X | IHLGELHAILRRQEDFYPFLKDNREKIEKILTFRIPYYVGPLARGNSRFAWMTRKSEET | |
| Where “X” is | ITPWNFEEVVDKGASAQSFIERMTNFDKNLPNEKVLPKHSLLYEYFTVYNELTKVKYVT | |
| any amino | EGMRKPAFLSGEQKKAIVDLLFKTNRKVTVKQLKEDYFKKIECFDSVEISGVEDRFNAS | |
| acid | EATRLKRTARRRYTRRKNRICYLQEIFSNEMAKVDDSFFHRLEESFLVEEDKKHERHPI | |
| | LGTYHDLLKIIKDKDFLDNEENEDILEDIVLTLTLFEDREMIEERLKTYAHLFDDKVMK | |
| | QLKRRRYTGWGRLSRKLINGIRDKQSGKTILDFLKSDGFANRNFMQLIHDDSLTFKEDI | |
| | QKAQVSGQGDSLHEHIANLAGSPAIKKGILQTVKVVDELVKVMGRHKPENIVIEMAREN | |
| | QTTQKGQKNSRERMKRIEEGIKELGSQILKEHPVENTQLQNEKLYLYYLQNGRDMYVDQ | |
| | ELDINRLSDYDVDXIVPQSFLKDDSIDNKVLTRSDKNRGKSDNVPSEEVVKKMKNYWRQ | |
| | LLNAKLITQRKFDWLTKAERGGLSELDKAGFIKRQLVETRQITKHVAQILDSRMNTKYD | |
| | ENDKLIREVKVITLKSKLVSDFRKDFQFYKVREINNYHHAHDAYLNAVVGTALIKKYPK | |
| | LESEFVYGDYKVYDVRKMIAKSEQEIGKATAKYFFYSNIMNFFKTEITLANGEIRKRPL | |
| | IETNGETGEIVWDKGRDFATVRKVLSMPQVNIVKKTEVQTGGFSKESILPKRNSDKLIA | |
| | RKKDWDPKKYGGFDSPTVAYSVLVVAKVEKGKSKKLKSVKELLGITIMERSSFEKNPID | |
| | FLEAKGYKEVKKDLIIKLPKYSLFELENGRKRMLASAGELQKGNELALPSKYVNFLYLA | |
| | SHYEKLKGSPEDNEQKQLFVEQHKHYLDEIIEQISEFSKRVILADANLDKVLSAYNKHR | |
| | DKPIREQAENIIHLFTLTNLGAPAAFKYFDTTIDRKRYTSTKEVLDATLIHQSITGLYE | |
| | TRIDLSQLGGD | |
| dead Cas9 or | MDKKYSIGLAIGTNSVGWAVITDEYKVPSKKFKVLGNTDRHSIKKNLIGALLFDSGETA | 28 |
| dCas9 | EATRLKRTARRRYTRRKNRICYLQEIFSNEMAKVDDSFFHRLEESFLVEEDKKHERHPI | |
| Streptococcus | FGNIVDEVAYHEKYPTIYHLRKKLVDSTDKADLRLIYLALAHMIKFRGHFLIEGDLNPD | |
| pyogenes | NSDVDKLFIQLVQTYNQLFEENPINASGVDAKAILSARLSKSRRLENLIAQLPGEKKNG | |
| Q99ZW2 Cas9 | LFGNLIALSLGLTPNFKSNFDLAEDAKLQLSKDTYDDDLDNLLAQIGDQYADLFLAAKN | |
| with D10A | LSDAILLSDILRVNTEITKAPLSASMIKRYDEHHQDLTLLKALVRQQLPEKYKEIFFDQ | |
| and H810A | SKNGYAGYIDGGASQEEFYKFIKPILEKMDGTEELLVKLNREDLLRKQRTFDNGSIPHQ | |
| | IHLGELHAILRRQEDFYPFLKDNREKIEKILTFRIPYYVGPLARGNSRFAWMTRKSEET | |
| | ITPWNFEEVVDKGASAQSFIERMTNFDKNLPNEKVLPKHSLLYEYFTVYNELTKVKYVT | |
| | EGMRKPAFLSGEQKKAIVDLLFKTNRKVTVKQLKEDYFKKIECFDSVEISGVEDRFNAS | |
| | LGTYHDLLKIIKDKDFLDNEENEDILEDIVLTLTLFEDREMIEERLKTYAHLFDDKVMK | |
| | QLKRRRYTGWGRLSRKLINGIRDKQSGKTILDFLKSDGFANRNFMQLIHDDSLTFKEDI | |
| | QKAQVSGQGDSLHEHIANLAGSPAIKKGILQTVKVVDELVKVMGRHKPENIVIEMAREN | |
| | QTTQKGQKNSRERMKRIEEGIKELGSQILKEHPVENTQLQNEKLYLYYLQNGRDMYVDQ | |
| | ELDINRLSDYDVDAIVPQSFLKDDSIDNKVLTRSDKNRGKSDNVPSEEVVKKMKNYWRQ | |
| | LLNAKLITQRKFDWLTKAERGGLSELDKAGFIKRQLVETRQITKHVAQILDSRMNTKYD | |
| | ENDKLIREVKVITLKSKLVSDFRKDFQFYKVREINNYHHAHDAYLNAVVGTALIKKYPK | |
| | LESEFVYGDYKVYDVRKMIAKSEQEIGKATAKYFFYSNIMNFFKTEITLANGEIRKRPL | |
| | IETNGETGEIVWDKGRDFATVRKVLSMPQVNIVKKTEVQTGGFSKESILPKRNSDKLIA | |
| | RKKDWDPKKYGGFDSPTVAYSVLVVAKVEKGKSKKLKSVKELLGITIMERSSFEKNPID | |
| | FLEAKGYKEVKKDLIIKLPKYSLFELENGRKRMLASAGELQKGNELALPSKYVNFLYLA | |
| | SHYEKLKGSPEDNEQKQLFVEQHKHYLDEIIEQISEFSKRVILADANLDKVLSAYNKHR | |
| | DKPIREQAENIIHLFTLTNLGAPAAFKYFDTTIDRKRYTSTKEVLDATLIHQSITGLYE | |
| | TRIDLSQLGGD | |

### (4) Cas9 Nickase Variant

[0199] In one embodiment, the base editors described herein comprise a Cas9 nickase. The term “Cas9 nickase” of “nCas9” refers to a variant of Cas9 which is capable of introducing a single-strand break in a double strand DNA molecule target. In some embodiments, the Cas9 nickase comprises only a single functioning nuclease domain. The wild type Cas9 (e.g., the canonical SpCas9) comprises two separate nuclease domains, namely, the RuvC domain (which cleaves the non-protospacer DNA strand) and HNH domain (which cleaves the protospacer DNA strand). In one embodiment, the Cas9 nickase comprises a mutation in the RuvC domain which inactivates the RuvC nuclease activity. For example, mutations in aspartate (D) 10, histidine (H) 983, aspartate (D) 986, or glutamate (E) 762, have been reported as loss-of-function mutations of the RuvC nuclease domain and the creation of a functional Cas9 nickase (e.g., Nishimasu et al., “Crystal structure of Cas9 in complex with guide RNA and target DNA,” Cell 156(5), 935-949, which is incorporated herein by reference). Thus, nickase mutations in the RuvC domain could include D10X, H983X, D986X, or E762X, wherein X is any amino acid other than the wild type amino acid. In certain embodiments, the nickase could be D10A, of H983A, or D986A, or E762A, or a combination thereof.

[0200] In various embodiments, the Cas9 nickase can have a mutation in the RuvC nuclease domain and have one of the following amino acid sequences, or a variant thereof having an amino acid sequence that has at least 80%, at least 85%, at least 90%, at least 95%, or at least 99% sequence identity thereto.

| | | SEQ |
|---|---|---|
| Description | Sequence | ID NO: |
| Cas9 nickase | MDKKYSIGLXIGTNSVGWAVITDEYKVPSKKFKVLGNTDRHSIKKNLIGALLFDSGETA | 29 |
| Streptococcus | EATRLKRTARRRYTRRKNRICYLQEIFSNEMAKVDDSFFHRLEESFLVEEDKKHERHPI | |
| pyogenes | FGNIVDEVAYHEKYPTIYHLRKKLVDSTDKADLRLIYLALAHMIKFRGHFLIEGDLNPD | |
| Q992W2 Cas9 | NSDVDKLFIQLVOTYNQLFEENPINASGVDAKAILSARLSKSRRLENLIAQLPGEKKNG | |
| with D10X, | LFGNLIALSLGLTPNFKSNFDLAEDAKLQLSKDTYDDDLDNLLAQIGDQYADLFLAAKN | |
| wherein X is | LSDAILLSDILRVNTEITKAPLSASMIKRYDEHHQDLTLLKALVRQQLPEKYKEIFFDO | |
| any | SKNGYAGYIDGGASQEEFYKFIKPILEKMDGTEELLVKLNREDLLRKQRTFDNGSIPHQ | |
| alternate | IHLGELHAILRRQEDFYPFLKDNREKIEKILTFRIPYYVGPLARGNSRFAWMTRKSEET | |
| amino acid | ITPWNFEEVVDKGASAQSFIERMTNFDKNLPNEKVLPKHSLLYEYFTVYNELTKVKYVT | |
| | EGMRKPAFLSGEQKKAIVDLLFKTNRKVTVKQLKEDYFKKIECFDSVEISGVEDRFNAS | |
| | LGTYHDLLKIIKDKDFLDNEENEDILEDIVLTLTLFEDREMIEERLKTYAHLFDDKVMK | |
| | QLKRRRYTGWGRLSRKLINGIRDKQSGKTILDFLKSDGFANRNFMQLIHDDSLTFKEDI | |
| | QKAQVSGQGDSLHEHIANLAGSPAIKKGILQTVKVVDELVKVMGRHKPENIVIEMAREN | |
| | QTTQKGQKNSRERMKRIEEGIKELGSQILKEHPVENTQLQNEKLYLYYLQNGRDMYVDQ | |
| | ELDINRLSDYDVDHIVPQSFLKDDSIDNKVLTRSDKNRGKSDNVPSEEVVKKMKNYWRQ | |
| | LLNAKLITQRKFDNLTKAERGGLSELDKAGFIKRQLVETRQITKHVAQILDSRMNTKYD | |
| | ENDKLIREVKVITLKSKLVSDFRKDFQFYKVREINNYHHAHDAYLNAVVGTALIKKYPK | |
| | LESEFVYGDYKVYDVRKMIAKSEQEIGKATAKYFFYSNIMNFFKTEITLANGEIRKRPL | |
| | IETNGETGEIVWDKGRDFATVRKVLSMPQVNIVKKTEVQTGGFSKESILPKRNSDKLIA | |
| | RKKDWDPKKYGGFDSPTVAYSVLVVAKVEKGKSKKLKSVKELLGITIMERSSFEKNPID | |
| | FLEAKGYKEVKKDLIIKLPKYSLFELENGRKRMLASAGELQKGNELALPSKYVNFLYLA | |
| | SHYEKLKGSPEDNEQKQLFVEQHKHYLDEIIEQISEFSKRVILADANLDKVLSAYNKHR | |
| | DKPIREQAENIIHLFTLTNLGAPAAFKYFDTTIDRKRYTSTKEVLDATLIHQSITGLYE | |
| | TRIDLSQLGGD | |
| Cas9 nickase | MDKKYSIGLDIGTNSVGWAVITDEYKVPSKKFKVLGNTDRHSIKKNLIGALLFDSGETA | 30 |
| Streptococcus | EATRLKRTARRRYTRRKNRICYLQEIFSNEMAKVDDSFFHRLEESFLVEEDKKHERHPI | |
| pyogenes | FGNIVDEVAYHEKYPTIYHLRKKLVDSTDKADLRLIYLALAHMIKFRGHFLIEGDLNPD | |
| Q992W2 Cas9 | NSDVDKLFIQLVQTYNQLFEENPINASGVDAKAILSARLSKSRRLENLIAQLPGEKKNG | |
| with E762X, | LFGNLIALSLGLTPNFKSNFDLAEDAKLQLSKDTYDDDLDNLLAQIGDQYADLFLAAKN | |
| wherein X is | LSDAILLSDILRVNTEITKAPLSASMIKRYDEHHQDLTLLKALVRQQLPEKYKEIFFDQ | |
| any | SKNGYAGYIDGGASQEEFYKFIKPILEKMDGTEELLVKLNREDLLRKQRTFDNGSIPHQ | |
| alternate | IHLGELHAILRRQEDFYPFLKDNREKIEKILTFRIPYYVGPLARGNSRFAWMTRKSEET | |
| amino acid | ITPWNFEEVVDKGASAQSFIERMTNFDKNLPNEKVLPKHSLLYEYFTVYNELTKVKYVT | |
| | EGMRKPAFLSGEQKKAIVDLLFKTNRKVTVKQLKEDYFKKIECFDSVEISGVEDRFNAS | |
| | LGTYHDLLKIIKDKDFLDNEENEDILEDIVLTLTLFEDREMIEERLKTYAHLFDDKVMK | |
| | QLKRRRYTGWGRLSRKLINGIRDKQSGKTILDFLKSDGFANRNFMQLIHDDSLTFKEDI | |
| | QKAQVSGQGDSLHEHIANLAGSPAIKKGILQTVKVVDELVKVMGRHKPENIVIXMAREN | |
| | QTTQKGQKNSRERMKRIEEGIKELGSQILKEHPVENTQLQNEKLYLYYLQNGRDMYVDQ | |
| | ELDINRLSDYDVDHIVPQSFLKDDSIDNKVLTRSDKNRGKSDNVPSEEVVKKMKNYWRQ | |
| | LLNAKLITQRKFDNLTKAERGGLSELDKAGFIKRQLVETRQITKHVAQILDSRMNTKYD | |
| | ENDKLIREVKVITLKSKLVSDFRKDFQFYKVREINNYHHAHDAYLNAVVGTALIKKYPK | |
| | LESEFVYGDYKVYDVRKMIAKSEQEIGKATAKYFFYSNIMNFFKTEITLANGEIRKRPL | |
| | IETNGETGEIVWDKGRDFATVRKVLSMPQVNIVKKTEVQTGGFSKESILPKRNSDKLIA | |
| | RKKDWDPKKYGGFDSPTVAYSVLVVAKVEKGKSKKLKSVKELLGITIMERSSFEKNPID | |
| | FLEAKGYKEVKKDLIIKLPKYSLFELENGRKRMLASAGELQKGNELALPSKYVNFLYLA | |
| | SHYEKLKGSPEDNEQKQLFVEQHKHYLDEIIEQISEFSKRVILADANLDKVLSAYNKHR | |
| | DKPIREQAENIIHLFTLTNLGAPAAFKYFDTTIDRKRYTSTKEVLDATLIHQSITGLYE | |
| | TRIDLSQLGGD | |
| Cas9 nickase | MDKKYSIGLDIGTNSVGWAVITDEYKVPSKKFKVLGNTDRHSIKKNLIGALLFDSGETA | 31 |
| Streptococcus | EATRLKRTARRRYTRRKNRICYLQEIFSNEMAKVDDSFFHRLEESFLVEEDKKHERHPI | |
| pyogenes | FGNIVDEVAYHEKYPTIYHLRKKLVDSTDKADLRLIYLALAHMIKFRGHFLIEGDLNPD | |
| Q992W2 Cas9 | NSDVDKLFIQLVQTYNQLFEENPINASGVDAKAILSARLSKSRRLENLIAQLPGEKKNG | |
| with H983X, | LFGNLIALSLGLTPNFKSNFDLAEDAKLQLSKDTYDDDLDNLLAQIGDQYADLFLAAKN | |
| wherein X is | LSDAILLSDILRVNTEITKAPLSASMIKRYDEHHQDLTLLKALVRQQLPEKYKEIFFDQ | |
| any | SKNGYAGYIDGGASQEEFYKFIKPILEKMDGTEELLVKLNREDLLRKQRTFDNGSIPHQ | |
| alternate | IHLGELHAILRRQEDFYPFLKDNREKIEKILTFRIPYYVGPLARGNSRFAWMTRKSEET | |
| amino acid | ITPWNFEEVVDKGASAQSFIERMTNFDKNLPNEKVLPKHSLLYEYFTVYNELTKVKYVT | |
| | EGMRKPAFLSGEQKKAIVDLLFKTNRKVTVKQLKEDYFKKIECFDSVEISGVEDRFNAS | |
| | LGTYHDLLKIIKDKDFLDNEENEDILEDIVLTLTLFEDREMIEERLKTYAHLFDDKVMK | |
| | QLKRRRYTGWGRLSRKLINGIRDKQSGKTILDFLKSDGFANRNFMQLIHDDSLTFKEDI | |
| | QKAQVSGQGDSLHEHIANLAGSPAIKKGILQTVKVVDELVKVMGRHKPENIVIEMAREN | |
| | QTTQKGQKNSRERMKRIEEGIKELGSQILKEHPVENTQLQNEKLYLYYLONGRDMYVDO | |
| | ELDINRLSDYDVDHIVPQSFLKDDSIDNKVLTRSDKNRGKSDNVPSEEVVKKMKNYWRO | |
| | LLNAKLITQRKFDNLTKAERGGLSELDKAGFIKRQLVETRQITKHVAQILDSRMNTKYD | |
| | ENDKLIREVKVITLKSKLVSDFRKDFQFYKVREINNYHXAHDAYLNAVVGTALIKKYPK | |
| | LESEFVYGDYKVYDVRKMIAKSEQEIGKATAKYFFYSNTMNFFKTEITLANGEIRKRPL | |
| | IETNGETGEIVWDKGRDFATVRKVLSMPQVNIVKKTEVQTGGFSKESILPKRNSDKLIA | |
| | RKKDWDPKKYGGFDSPTVAYSVLVVAKVEKGKSKKLKSVKELLGITIMERSSFEKNPID | |
| | FLEAKGYKEVKKDLIIKLPKYSLFELENGRKRMLASAGELQKGNELALPSKYVNFLYLA | |
| | SHYEKLKGSPEDNEQKQLFVEQHKHYLDEIIEQISEFSKRVILADANLDKVLSAYNKHR | |
| | DKPIREQAENIIHLFTLTNLGAPAAFKYFDTTIDRKRYTSTKEVLDATLIHQSITGLYE | |
| | TRIDLSQLGGD | |
| Cas9 nickase | MDKKYSIGLDIGTNSVGWAVITDEYKVPSKKFKVLGNTDRHSIKKNLIGALLFDSGETA | 32 |
| Streptococcus | EATRLKRTARRRYTRRKNRICYLQEIFSNEMAKVDDSFFHRLEESFLVEEDKKHERHPI | |
| pyogenes | FGNIVDEVAYHEKYPTIYHLRKKLVDSTDKADLRLIYLALAHMIKFRGHFLIEGDLNPD | |
| Q99ZW2 Cas9 | NSDVDKLFIQLVQTYNQLFEENPINASGVDAKAILSARLSKSRRLENLIAQLPGEKKNG | |
| with D986X, | LFGNLIALSLGLTPNFKSNFDLAEDAKLQLSKDTYDDDLDNLLAQIGDQYADLFLAAKN | |
| wherein X is | LSDAILLSDILRVNTEITKAPLSASMIKRYDEHHQDLTLLKALVRQQLPEKYKEIFFDQ | |
| any | SKNGYAGYIDGGASQEEFYKFIKPILEKMDGTEELLVKLNREDLLRKQRTFDNGSIPHQ | |
| alternate | IHLGELHAILRRQEDFYPFLKDNREKIEKILTFRIPYYVGPLARGNSRFAWMTRKSEET | |
| amino acid | ITPWNFEEVVDKGASAQSFIERMTNFDKNLPNEKVLPKHSLLYEYFTVYNELTKVKYVT | |
| | EGMRKPAFLSGEQKKAIVDLLFKTNRKVTVKQLKEDYFKKIECFDSVEISGVEDRFNAS | |
| | LGTYHDLLKIIKDKDFLDNEENEDILEDIVLTLTLFEDREMIEERLKTYAHLFDDKVMK | |
| | QLKRRRYTGWGRLSRKLINGIRDKQSGKTILDFLKSDGFANRNFMQLIHDDSLTFKEDI | |
| | QKAQVSGQGDSLHEHIANLAGSPAIKKGILQTVKVVDELVKVMGRHKPENIVIEMAREN | |
| | QTTQKGQKNSRERMKRIEEGIKELGSQILKEHPVENTQLQNEKLYLYYLQNGRDMYVDQ | |
| | ELDINRLSDYDVDHIVPQSFLKDDSIDNKVLTRSDKNRGKSDNVPSEEVVKKMKNYWRQ | |
| | LLNAKLITQRKFDNLTKAERGGLSELDKAGFIKRQLVETRQITKHVAQILDSRMNTKYD | |
| | ENDKLIREVKVITLKSKLVSDFRKDFQFYKVREINNYHHAHXAYLNAVVGTALIKKYPK | |
| | LESEFVYGDYKVYDVRKMIAKSEQEIGKATAKYFFYSNIMNFFKTEITLANGEIRKRPL | |
| | IETNGETGEIVWDKGRDFATVRKVLSMPQVNIVKKTEVQTGGFSKESILPKRNSDKLIA | |
| | RKKDWDPKKYGGFDSPTVAYSVLVVAKVEKGKSKKLKSVKELLGITIMERSSFEKNPID | |
| | FLEAKGYKEVKKDLIIKLPKYSLFELENGRKRMLASAGELQKGNELALPSKYVNFLYLA | |
| | SHYEKLKGSPEDNEQKQLFVEQHKHYLDEIIEQISEFSKRVILADANLDKVLSAYNKHR | |
| | DKPIREQAENIIHLFTLTNLGAPAAFKYFDTTIDRKRYTSTKEVLDATLIHQSITGLYE | |
| | TRIDLSQLGGD | |
| Cas9 nickase | MDKKYSIGLAIGTNSVGWAVITDEYKVPSKKFKVLGNTDRHSIKKNLIGALLFDSGETA | 33 |
| Streptococcus | EATRLKRTARRRYTRRKNRICYLQEIFSNEMAKVDDSFFHRLEESFLVEEDKKHERHPI | |
| pyogenes | FGNIVDEVAYHEKYPTIYHLRKKLVDSTDKADLRLIYLALAHMIKFRGHFLIEGDLNPD | |
| Q992W2 Cas9 | NSDVDKLFIQLVQTYNQLFEENPINASGVDAKAILSARLSKSRRLENLIAQLPGEKKNG | |
| with D10A | LFGNLIALSLGLTPNFKSNFDLAEDAKLQLSKDTYDDDLDNLLAQIGDQYADLFLAAKN | |
| | LSDAILLSDILRVNTEITKAPLSASMIKRYDEHHQDLTLLKALVRQQLPEKYKEIFFDQ | |
| | SKNGYAGYIDGGASQEEFYKFIKPILEKMDGTEELLVKLNREDLLRKQRTFDNGSIPHQ | |
| | IHLGELHAILRRQEDFYPFLKDNREKIEKILTFRIPYYVGPLARGNSRFAWMTRKSEET | |
| | ITPWNFEEVVDKGASAQSFIERMTNFDKNLPNEKVLPKHSLLYEYFTVYNELTKVKYVT | |
| | EGMRKPAFLSGEQKKAIVDLLFKTNRKVTVKQLKEDYFKKIECFDSVEISGVEDRFNAS | |
| | LGTYHDLLKIIKDKDFLDNEENEDILEDIVLTLTLFEDREMIEERLKTYAHLFDDKVMK | |
| | QLKRRRYTGWGRLSRKLINGIRDKQSGKTILDFLKSDGFANRNFMQLIHDDSLTFKEDI | |
| | QKAQVSGQGDSLHEHIANLAGSPAIKKGILQTVKVVDELVKVMGRHKPENIVIEMAREN | |
| | QTTQKGQKNSRERMKRIEEGIKELGSQILKEHPVENTQLQNEKLYLYYLQNGRDMYVDQ | |
| | ELDINRLSDYDVDHIVPQSFLKDDSIDNKVLTRSDKNRGKSDNVPSEEVVKKMKNYWRQ | |
| | LLNAKLITQRKFDNLTKAERGGLSELDKAGFIKRQLVETRQITKHVAQILDSRMNTKYD | |
| | ENDKLIREVKVITLKSKLVSDFRKDFQFYKVREINNYHHAHDAYLNAVVGTALIKKYPK | |
| | LESEFVYGDYKVYDVRKMIAKSEQEIGKATAKYFFYSNIMNFFKTEITLANGEIRKRPL | |
| | IETNGETGEIVWDKGRDFATVRKVLSMPQVNIVKKTEVQTGGFSKESILPKRNSDKLIA | |
| | RKKDWDPKKYGGFDSPTVAYSVLVVAKVEKGKSKKLKSVKELLGITIMERSSFEKNPID | |
| | FLEAKGYKEVKKDLIIKLPKYSLFELENGRKRMLASAGELQKGNELALPSKYVNFLYLA | |
| | SHYEKLKGSPEDNEQKQLFVEQHKHYLDEIIEQISEFSKRVILADANLDKVLSAYNKHR | |
| | DKPIREQAENIIHLFTLTNLGAPAAFKYFDTTIDRKRYTSTKEVLDATLIHQSITGLYE | |
| | TRIDLSQLGGD | |
| Cas9 nickase | MDKKYSIGLDIGTNSVGWAVITDEYKVPSKKFKVLGNTDRHSIKKNLIGALLFDSGETA | 34 |
| Streptococcus | EATRLKRTARRRYTRRKNRICYLQEIFSNEMAKVDDSFFHRLEESFLVEEDKKHERHPI | |
| pyogenes | FGNIVDEVAYHEKYPTIYHLRKKLVDSTDKADLRLIYLALAHMIKFRGHFLIEGDLNPD | |
| Q992W2 Cas9 | NSDVDKLFIQLVQTYNQLFEENPINASGVDAKAILSARLSKSRRLENLIAQLPGEKKNG | |
| with E762A | LFGNLIALSLGLTPNFKSNFDLAEDAKLQLSKDTYDDDLDNLLAQIGDQYADLFLAAKN | |
| | LSDAILLSDILRVNTEITKAPLSASMIKRYDEHHQDLTLLKALVRQQLPEKYKEIFFDQ | |
| | SKNGYAGYIDGGASQEEFYKFIKPILEKMDGTEELLVKLNREDLLRKQRTFDNGSIPHQ | |
| | IHLGELHAILRRQEDFYPFLKDNREKIEKILTFRIPYYVGPLARGNSRFAWMTRKSEET | |
| | ITPWNFEEVVDKGASAQSFIERMTNFDKNLPNEKVLPKHSLLYEYFTVYNELTKVKYVT | |
| | EGMRKPAFLSGEQKKAIVDLLFKTNRKVTVKQLKEDYFKKIECFDSVEISGVEDRFNAS | |
| | LGTYHDLLKIIKDKDFLDNEENEDILEDIVLTLTLFEDREMIEERLKTYAHLFDDKVMK | |
| | QLKRRRYTGWGRLSRKLINGIRDKQSGKTILDFLKSDGFANRNFMQLIHDDSLTFKEDI | |
| | QKAQVSGQGDSLHEHIANLAGSPAIKKGILQTVKVVDELVKVMGRHKPENIVIAMAREN | |
| | QTTQKGQKNSRERMKRIEEGIKELGSQILKEHPVENTQLQNEKLYLYYLQNGRDMYVDQ | |
| | ELDINRLSDYDVDHIVPQSFLKDDSIDNKVLTRSDKNRGKSDNVPSEEVVKKMKNYWRQ | |
| | LLNAKLITQRKFDNLTKAERGGLSELDKAGFIKRQLVETRQITKHVAQILDSRMNTKYD | |
| | ENDKLIREVKVITLKSKLVSDFRKDFQFYKVREINNYHHAHDAYLNAVVGTALIKKYPK | |
| | LESEFVYGDYKVYDVRKMIAKSEQEIGKATAKYFFYSNIMNFFKTEITLANGEIRKRPL | |
| | IETNGETGEIVWDKGRDFATVRKVLSMPQVNIVKKTEVQTGGFSKESILPKRNSDKLIA | |
| | RKKDWDPKKYGGFDSPTVAYSVLVVAKVEKGKSKKLKSVKELLGITIMERSSFEKNPID | |
| | FLEAKGYKEVKKDLIIKLPKYSLFELENGRKRMLASAGELQKGNELALPSKYVNFLYLA | |
| | SHYEKLKGSPEDNEQKQLFVEQHKHYLDEIIEQISEFSKRVILADANLDKVLSAYNKHR | |
| | DKPIREQAENIIHLFTLTNLGAPAAFKYFDTTIDRKRYTSTKEVLDATLIHQSITGLYE | |
| | TRIDLSQLGGD | |
| Cas9 nickase | MDKKYSIGLDIGTNSVGWAVITDEYKVPSKKFKVLGNTDRHSIKKNLIGALLFDSGETA | 35 |
| Streptococcus | EATRLKRTARRRYTRRKNRICYLQEIFSNEMAKVDDSFFHRLEESFLVEEDKKHERHPI | |
| pyogenes | FGNIVDEVAYHEKYPTIYHLRKKLVDSTDKADLRLIYLALAHMIKFRGHFLIEGDLNPD | |
| Q99ZW2 Cas9 | NSDVDKLFIQLVQTYNQLFEENPINASGVDAKAILSARLSKSRRLENLIAQLPGEKKNG | |
| with H983A | LFGNLIALSLGLTPNFKSNFDLAEDAKLQLSKDTYDDDLDNLLAQIGDQYADLFLAAKN | |
| | LSDAILLSDILRVNTEITKAPLSASMIKRYDEHHQDLTLLKALVRQQLPEKYKEIFFDQ | |
| | SKNGYAGYIDGGASQEEFYKFIKPILEKMDGTEELLVKLNREDLLRKQRTFDNGSIPHQ | |
| | IHLGELHAILRRQEDFYPFLKDNREKIEKILTFRIPYYVGPLARGNSRFAWMTRKSEET | |
| | ITPWNFEEVVDKGASAQSFIERMTNFDKNLPNEKVLPKHSLLYEYFTVYNELTKVKYVT | |
| | EGMRKPAFLSGEQKKAIVDLLFKTNRKVTVKQLKEDYFKKIECFDSVEISGVEDRFNAS | |
| | LGTYHDLLKIIKDKDFLDNEENEDILEDIVLTLTLFEDREMIEERLKTYAHLFDDKVMK | |
| | QLKRRRYTGWGRLSRKLINGIRDKQSGKTILDFLKSDGFANRNFMQLIHDDSLTFKEDI | |
| | QKAQVSGQGDSLHEHIANLAGSPAIKKGILQTVKVVDELVKVMGRHKPENIVIEMAREN | |
| | QTTQKGQKNSRERMKRIEEGIKELGSQILKEHPVENTQLQNEKLYLYYLQNGRDMYVDQ | |
| | ELDINRLSDYDVDHIVPQSFLKDDSIDNKVLTRSDKNRGKSDNVPSEEVVKKMKNYWRQ | |
| | LLNAKLITORKFDNLTKAERGGLSELDKAGFIKRQLVETRQITKHVAQILDSRMNTKYD | |
| | ENDKLIREVKVITLKSKLVSDFRKDFQFYKVREINNYHAAHDAYLNAVVGTALIKKYPK | |
| | LESEFVYGDYKVYDVRKMIAKSEQEIGKATAKYFFYSNTMNFFKTEITLANGEIRKRPL | |
| | IETNGETGEIVWDKGRDFATVRKVLSMPQVNIVKKTEVOTGGFSKESILPKRNSDKLIA | |
| | RKKDWDPKKYGGFDSPTVAYSVLVVAKVEKGKSKKLKSVKELLGITIMERSSFEKNPID | |
| | FLEAKGYKEVKKDLIIKLPKYSLFELENGRKRMLASAGELQKGNELALPSKYVNFLYLA | |
| | SHYEKLKGSPEDNEQKQLFVEQHKHYLDEIIEQISEFSKRVILADANLDKVLSAYNKHR | |
| | DKPIREQAENIIHLFTLTNLGAPAAFKYFDTTIDRKRYTSTKEVLDATLIHQSITGLYE | |
| | TRIDLSQLGGD | |
| Cas9 nickase | MDKKYSIGLDIGTNSVGWAVITDEYKVPSKKFKVLGNTDRHSIKKNLIGALLFDSGETA | 36 |
| Streptococcus | EATRLKRTARRRYTRRKNRICYLQEIFSNEMAKVDDSFFHRLEESFLVEEDKKHERHPI | |
| pyogenes | FGNIVDEVAYHEKYPTIYHLRKKLVDSTDKADLRLIYLALAHMIKFRGHFLIEGDLNPD | |
| Q992W2 Cas9 | NSDVDKLFIQLVQTYNQLFEENPINASGVDAKAILSARLSKSRRLENLIAQLPGEKKNG | |
| with D986A | LFGNLIALSLGLTPNFKSNFDLAEDAKLQLSKDTYDDDLDNLLAQIGDQYADLFLAAKN | |
| | LSDAILLSDILRVNTEITKAPLSASMIKRYDEHHQDLTLLKALVRQQLPEKYKEIFFDQ | |
| | SKNGYAGYIDGGASQEEFYKFIKPILEKMDGTEELLVKLNREDLLRKQRTFDNGSIPHQ | |
| | IHLGELHAILRRQEDFYPFLKDNREKIEKILTFRIPYYVGPLARGNSRFAWMTRKSEET | |
| | ITPWNFEEVVDKGASAQSFIERMTNFDKNLPNEKVLPKHSLLYEYFTVYNELTKVKYVT | |
| | EGMRKPAFLSGEQKKAIVDLLFKTNRKVTVKQLKEDYFKKIECFDSVEISGVEDRFNAS | |
| | LGTYHDLLKIIKDKDFLDNEENEDILEDIVLTLTLFEDREMIEERLKTYAHLFDDKVMK | |
| | QLKRRRYTGWGRLSRKLINGIRDKQSGKTILDFLKSDGFANRNFMQLIHDDSLTFKEDI | |
| | QKAQVSGQGDSLHEHIANLAGSPAIKKGILQTVKVVDELVKVMGRHKPENIVIEMAREN | |
| | QTTQKGQKNSRERMKRIEEGIKELGSQILKEHPVENTQLQNEKLYLYYLQNGRDMYVDQ | |
| | ELDINRLSDYDVDHIVPQSFLKDDSIDNKVLTRSDKNRGKSDNVPSEEVVKKMKNYWRQ | |
| | LLNAKLITQRKFDNLTKAERGGLSELDKAGFIKRQLVETRQITKHVAQILDSRMNTKYD | |
| | ENDKLIREVKVITLKSKLVSDFRKDFQFYKVREINNYHHAHAAYLNAVVGTALIKKYPK | |
| | LESEFVYGDYKVYDVRKMIAKSEQEIGKATAKYFFYSNIMNFFKTEITLANGEIRKRPL | |
| | IETNGETGEIVWDKGRDFATVRKVLSMPQVNIVKKTEVQTGGFSKESILPKRNSDKLIA | |
| | RKKDWDPKKYGGFDSPTVAYSVLVVAKVEKGKSKKLKSVKELLGITIMERSSFEKNPID | |
| | FLEAKGYKEVKKDLIIKLPKYSLFELENGRKRMLASAGELQKGNELALPSKYVNFLYLA | |
| | SHYEKLKGSPEDNEQKQLFVEQHKHYLDEIIEQISEFSKRVILADANLDKVLSAYNKHR | |
| | DKPIREQAENIIHLFTLTNLGAPAAFKYFDTTIDRKRYTSTKEVLDATLIHQSITGLYE | |
| | TRIDLSQLGGD | |

[0201] In another embodiment, the Cas9 nickase comprises a mutation in the HNH domain which inactivates the HNH nuclease activity. For example, mutations in histidine (H) 840 or asparagine (R) 863 have been reported as loss-of-function mutations of the HNH nuclease domain and the creation of a functional Cas9 nickase (e.g., Nishimasu et al., “Crystal structure of Cas9 in complex with guide RNA and target DNA,” Cell 156(5), 935-949, which is incorporated herein by reference). Thus, nickase mutations in the HNH domain could include H840X and R863X, wherein X is any amino acid other than the wild type amino acid. In certain embodiments, the nickase could be H840A or R863A or a combination thereof.

[0202] In various embodiments, the Cas9 nickase can have a mutation in the HNH nuclease domain and have one of the following amino acid sequences, or a variant thereof having an amino acid sequence that has at least 80%, at least 85%, at least 90%, at least 95%, or at least 99% sequence identity thereto.

| | | SEQ |
|---|---|---|
| Description | Sequence | ID NO: |
| Cas9 nickase | MDKKYSIGLDIGTNSVGWAVITDEYKVPSKKFKVLGNTDRHSIKKNLIGALLFDSGETA | 37 |
| Streptococcus | EATRLKRTARRRYTRRKNRICYLQEIFSNEMAKVDDSFFHRLEESFLVEEDKKHERHPI | |
| pyogenes | FGNIVDEVAYHEKYPTIYHLRKKLVDSTDKADLRLIYLALAHMIKFRGHFLIEGDLNPD | |
| Q992W2 Cas9 | NSDVDKLFIQLVOTYNQLFEENPINASGVDAKAILSARLSKSRRLENLIAQLPGEKKNG | |
| with H840X, | LFGNLIALSLGLTPNFKSNFDLAEDAKLQLSKDTYDDDLDNLLAQIGDQYADLFLAAKN | |
| wherein X is | LSDAILLSDILRVNTEITKAPLSASMIKRYDEHHQDLTLLKALVRQQLPEKYKEIFFDO | |
| any | SKNGYAGYIDGGASQEEFYKFIKPILEKMDGTEELLVKLNREDLLRKORTFDNGSIPHO | |
| alternate | IHLGELHAILRRQEDFYPFLKDNREKIEKILTFRIPYYVGPLARGNSRFAWMTRKSEET | |
| amino acid | ITPWNFEEVVDKGASAQSFIERMTNFDKNLPNEKVLPKHSLLYEYFTVYNELTKVKYVT | |
| | EGMRKPAFLSGEQKKAIVDLLFKTNRKVTVKQLKEDYFKKIECFDSVEISGVEDRFNAS | |
| | LGTYHDLLKIIKDKDFLDNEENEDILEDIVLTLTLFEDREMIEERLKTYAHLFDDKVMK | |
| | QLKRRRYTGWGRLSRKLINGIRDKQSGKTILDFLKSDGFANRNFMQLIHDDSLTFKEDI | |
| | QKAQVSGQGDSLHEHIANLAGSPAIKKGILQTVKVVDELVKVMGRHKPENIVIEMAREN | |
| | QTTQKGQKNSRERMKRIEEGIKELGSQILKEHPVENTQLQNEKLYLYYLQNGRDMYVDQ | |
| | ELDINRLSDYDVDXIVPQSFLKDDSIDNKVLTRSDKNRGKSDNVPSEEVVKKMKNYWRQ | |
| | LLNAKLITORKFDNLTKAERGGLSELDKAGFIKRQLVETRQITKHVAQILDSRMNTKYD | |
| | ENDKLIREVKVITLKSKLVSDFRKDFQFYKVREINNYHHAHDAYLNAVVGTALIKKYPK | |
| | LESEFVYGDYKVYDVRKMIAKSEQEIGKATAKYFFYSNIMNFFKTEITLANGEIRKRPL | |
| | IETNGETGEIVWDKGRDFATVRKVLSMPQVNIVKKTEVOTGGFSKESILPKRNSDKLIA | |
| | RKKDWDPKKYGGFDSPTVAYSVLVVAKVEKGKSKKLKSVKELLGITIMERSSFEKNPID | |
| | FLEAKGYKEVKKDLIIKLPKYSLFELENGRKRMLASAGELQKGNELALPSKYVNFLYLA | |
| | SHYEKLKGSPEDNEOKQLFVEQHKHYLDEIIEOISEFSKRVILADANLDKVLSAYNKHR | |
| | DKPIREQAENIIHLFTLTNLGAPAAFKYFDTTIDRKRYTSTKEVLDATLIHQSITGLYE | |
| | TRIDLSQLGGD | |
| Cas9 nickase | MDKKYSIGLDIGTNSVGWAVITDEYKVPSKKFKVLGNTDRHSIKKNLIGALLFDSGETA | 38 |
| Streptococcus | EATRLKRTARRRYTRRKNRICYLQEIFSNEMAKVDDSFFHRLEESFLVEEDKKHERHPI | |
| pyogenes | FGNIVDEVAYHEKYPTIYHLRKKLVDSTDKADLRLIYLALAHMIKFRGHFLIEGDLNPD | |
| Q99ZW2 Cas9 | NSDVDKLFIQLVQTYNQLFEENPINASGVDAKAILSARLSKSRRLENLIAQLPGEKKNG | |
| with H840A | LFGNLIALSLGLTPNFKSNFDLAEDAKLQLSKDTYDDDLDNLLAQIGDQYADLFLAAKN | |
| | LSDAILLSDILRVNTEITKAPLSASMIKRYDEHHQDLTLLKALVRQQLPEKYKEIFFDQ | |
| | SKNGYAGYIDGGASQEEFYKFIKPILEKMDGTEELLVKLNREDLLRKQRTFDNGSIPHQ | |
| | IHLGELHAILRRQEDFYPFLKDNREKIEKILTFRIPYYVGPLARGNSRFAWMTRKSEET | |
| | ITPWNFEEVVDKGASAQSFIERMTNFDKNLPNEKVLPKHSLLYEYFTVYNELTKVKYVT | |
| | EGMRKPAFLSGEQKKAIVDLLFKTNRKVTVKQLKEDYFKKIECFDSVEISGVEDRFNAS | |
| | LGTYHDLLKIIKDKDFLDNEENEDILEDIVLTLTLFEDREMIEERLKTYAHLFDDKVMK | |
| | QLKRRRYTGWGRLSRKLINGIRDKQSGKTILDFLKSDGFANRNFMQLIHDDSLTFKEDI | |
| | QKAQVSGQGDSLHEHIANLAGSPAIKKGILQTVKVVDELVKVMGRHKPENIVIEMAREN | |
| | QTTQKGQKNSRERMKRIEEGIKELGSQILKEHPVENTQLQNEKLYLYYLQNGRDMYVDQ | |
| | ELDINRLSDYDVDAIVPQSFLKDDSIDNKVLTRSDKNRGKSDNVPSEEVVKKMKNYWRQ | |
| | LLNAKLITQRKFDWLTKAERGGLSELDKAGFIKRQLVETRQITKHVAQILDSRMNTKYD | |
| | ENDKLIREVKVITLKSKLVSDFRKDFQFYKVREINNYHHAHDAYLNAVVGTALIKKYPK | |
| | LESEFVYGDYKVYDVRKMIAKSEQEIGKATAKYFFYSNIMNFFKTEITLANGEIRKRPL | |
| | IETNGETGEIVWDKGRDFATVRKVLSMPQVNIVKKTEVQTGGFSKESILPKRNSDKLIA | |
| | RKKDWDPKKYGGFDSPTVAYSVLVVAKVEKGKSKKLKSVKELLGITIMERSSFEKNPID | |
| | FLEAKGYKEVKKDLIIKLPKYSLFELENGRKRMLASAGELQKGNELALPSKYVNFLYLA | |
| | SHYEKLKGSPEDNEQKQLFVEQHKHYLDEIIEQISEFSKRVILADANLDKVLSAYNKHR | |
| | DKPIREQAENIIHLFTLTNLGAPAAFKYFDTTIDRKRYTSTKEVLDATLIHQSITGLYE | |
| | TRIDLSOLGGD | |
| Cas9 nickase | MDKKYSIGLDIGTNSVGWAVITDEYKVPSKKFKVLGNTDRHSIKKNLIGALLFDSGETA | 39 |
| Streptococcus | EATRLKRTARRRYTRRKNRICYLQEIFSNEMAKVDDSFFHRLEESFLVEEDKKHERHPI | |
| pyogenes | FGNIVDEVAYHEKYPTIYHLRKKLVDSTDKADLRLIYLALAHMIKFRGHFLIEGDLNPD | |
| Q99ZW2 Cas9 | NSDVDKLFIQLVQTYNQLFEENPINASGVDAKAILSARLSKSRRLENLIAQLPGEKKNG | |
| with R863X, | LFGNLIALSLGLTPNFKSNFDLAEDAKLQLSKDTYDDDLDNLLAQIGDQYADLFLAAKN | |
| wherein X is | LSDAILLSDILRVNTEITKAPLSASMIKRYDEHHQDLTLLKALVRQQLPEKYKEIFFDQ | |
| any | SKNGYAGYIDGGASQEEFYKFIKPILEKMDGTEELLVKLNREDLLRKQRTFDNGSIPHQ | |
| alternate | IHLGELHAILRRQEDFYPFLKDNREKIEKILTFRIPYYVGPLARGNSRFAWMTRKSEET | |
| amino acid | ITPWNFEEVVDKGASAQSFIERMTNFDKNLPNEKVLPKHSLLYEYFTVYNELTKVKYVT | |
| | EGMRKPAFLSGEQKKAIVDLLFKTNRKVTVKQLKEDYFKKIECFDSVEISGVEDRFNAS | |
| | LGTYHDLLKIIKDKDFLDNEENEDILEDIVLTLTLFEDREMIEERLKTYAHLFDDKVMK | |
| | QLKRRRYTGWGRLSRKLINGIRDKQSGKTILDFLKSDGFANRNFMQLIHDDSLTFKEDI | |
| | QKAQVSGQGDSLHEHIANLAGSPAIKKGILQTVKVVDELVKVMGRHKPENIVIEMAREN | |
| | QTTQKGQKNSRERMKRIEEGIKELGSQILKEHPVENTQLQNEKLYLYYLQNGRDMYVDQ | |
| | ELDINRLSDYDVDHIVPQSFLKDDSIDNKVLTRSDKNXGKSDNVPSEEVVKKMKNYWRQ | |
| | LLNAKLITQRKFDNLTKAERGGLSELDKAGFIKRQLVETRQITKHVAQILDSRMNTKYD | |
| | ENDKLIREVKVITLKSKLVSDFRKDFQFYKVREINNYHHAHDAYLNAVVGTALIKKYPK | |
| | LESEFVYGDYKVYDVRKMIAKSEQEIGKATAKYFFYSNIMNFFKTEITLANGEIRKRPL | |
| | IETNGETGEIVWDKGRDFATVRKVLSMPQVNIVKKTEVQTGGFSKESILPKRNSDKLIA | |
| | RKKDWDPKKYGGFDSPTVAYSVLVVAKVEKGKSKKLKSVKELLGITIMERSSFEKNPID | |
| | FLEAKGYKEVKKDLIIKLPKYSLFELENGRKRMLASAGELQKGNELALPSKYVNFLYLA | |
| | SHYEKLKGSPEDNEQKQLFVEQHKHYLDEIIEQISEFSKRVILADANLDKVLSAYNKHR | |
| | DKPIREQAENIIHLFTLTNLGAPAAFKYFDTTIDRKRYTSTKEVLDATLIHQSITGLYE | |
| | TRIDLSOLGGD | |
| Cas9 nickase | MDKKYSIGLDIGTNSVGWAVITDEYKVPSKKFKVLGNTDRHSIKKNLIGALLFDSGETA | 40 |
| Streptococcus | EATRLKRTARRRYTRRKNRICYLQEIFSNEMAKVDDSFFHRLEESFLVEEDKKHERHPI | |
| pyogenes | FGNIVDEVAYHEKYPTIYHLRKKLVDSTDKADLRLIYLALAHMIKFRGHFLIEGDLNPD | |
| Q992W2 Cas9 | NSDVDKLFIQLVQTYNQLFEENPINASGVDAKAILSARLSKSRRLENLIAQLPGEKKNG | |
| with R863A | LFGNLIALSLGLTPNFKSNFDLAEDAKLQLSKDTYDDDLDNLLAQIGDQYADLFLAAKN | |
| | LSDAILLSDILRVNTEITKAPLSASMIKRYDEHHQDLTLLKALVRQQLPEKYKEIFFDQ | |
| | SKNGYAGYIDGGASQEEFYKFIKPILEKMDGTEELLVKLNREDLLRKQRTFDNGSIPHQ | |
| | IHLGELHAILRRQEDFYPFLKDNREKIEKILTFRIPYYVGPLARGNSRFAWMTRKSEET | |
| | ITPWNFEEVVDKGASAQSFIERMTNFDKNLPNEKVLPKHSLLYEYFTVYNELTKVKYVT | |
| | EGMRKPAFLSGEQKKAIVDLLFKTNRKVTVKQLKEDYFKKIECFDSVEISGVEDRFNAS | |
| | LGTYHDLLKIIKDKDFLDNEENEDILEDIVLTLTLFEDREMIEERLKTYAHLFDDKVMK | |
| | QLKRRRYTGWGRLSRKLINGIRDKQSGKTILDFLKSDGFANRNFMQLIHDDSLTFKEDI | |
| | QKAQVSGQGDSLHEHIANLAGSPAIKKGILQTVKVVDELVKVMGRHKPENIVIEMAREN | |
| | QTTQKGQKNSRERMKRIEEGIKELGSQILKEHPVENTQLQNEKLYLYYLQNGRDMYVDQ | |
| | ELDINRLSDYDVDHIVPQSFLKDDSIDNKVLTRSDKNAGKSDNVPSEEVVKKMKNYWRQ | |
| | LLNAKLITQRKFDNLTKAERGGLSELDKAGFIKRQLVETRQITKHVAQILDSRMNTKYD | |
| | ENDKLIREVKVITLKSKLVSDFRKDFQFYKVREINNYHHAHDAYLNAVVGTALIKKYPK | |
| | LESEFVYGDYKVYDVRKMIAKSEQEIGKATAKYFFYSNIMNFFKTEITLANGEIRKRPL | |
| | IETNGETGEIVWDKGRDFATVRKVLSMPQVNIVKKTEVQTGGFSKESILPKRNSDKLIA | |
| | RKKDWDPKKYGGFDSPTVAYSVLVVAKVEKGKSKKLKSVKELLGITIMERSSFEKNPID | |
| | FLEAKGYKEVKKDLIIKLPKYSLFELENGRKRMLASAGELQKGNELALPSKYVNFLYLA | |
| | SHYEKLKGSPEDNEQKQLFVEQHKHYLDEIIEQISEFSKRVILADANLDKVLSAYNKHR | |
| | DKPIREQAENIIHLFTLTNLGAPAAFKYFDTTIDRKRYTSTKEVLDATLIHQSITGLYE | |
| | TRIDLSOLGGD | |

[0203] In some embodiments, the N-terminal methionine is removed from a Cas9 nickase, or from any Cas9 variant, ortholog, or equivalent disclosed or contemplated herein. For example, methionine-minus Cas9 nickases include the following sequences, or a variant thereof having an amino acid sequence that has at least 80%, at least 85%, at least 90%, at least 95%, or at least 99% sequence identity thereto.

| Description | Sequence |
|---|---|
| Cas9 nickase | DKKYSIGLDIGTNSVGWAVITDEYKVPSKKFKVLGNTDRHSIKKNLIGALLFDSGETAEATRLKRTARRR |
| (Met minus) | YTRRKNRICYLQEIFSNEMAKVDDSFFHRLEESFLVEEDKKHERHPIFGNIVDEVAYHEKYPTIYHLRKK |
| Streptococcus | LVDSTDKADLRLIYLALAHMIKFRGHFLIEGDLNPDNSDVDKLFIQLVOTYNQLFEENPINASGVDAKAI |
| pyogenes | LSARLSKSRRLENLIAQLPGEKKNGLFGNLIALSLGLTPNFKSNFDLAEDAKLQLSKDTYDDDLDNLLAO |
| Q992W2 Cas9 | IGDQYADLFLAAKNLSDAILLSDILRVNTEITKAPLSASMIKRYDEHHQDLTLLKALVROQLPEKYKEIE |
| with H840X, | FDQSKNGYAGYIDGGASQEEFYKFIKPILEKMDGTEELLVKLNREDLLRKQRTFDNGSIPHQIHLGELHA |
| wherein X is | ILRRQEDFYPFLKDNREKIEKILTFRIPYYVGPLARGNSRFAWMTRKSEETITPWNFEEVVDKGASAQSF |
| any | IERMTNFDKNLPNEKVLPKHSLLYEYFTVYNELTKVKYVTEGMRKPAFLSGEQKKAIVDLLFKTNRKVTV |
| alternate | KQLKEDYFKKIECFDSVEISGVEDRFNASLGTYHDLLKIIKDKDFLDNEENEDILEDIVLTLTLFEDREM |
| amino acid | IEERLKTYAHLFDDKVMKQLKRRRYTGWGRLSRKLINGIRDKQSGKTILDFLKSDGFANRNEMQLIHDDS |
| | LTFKEDIQKAQVSGQGDSLHEHIANLAGSPAIKKGILQTVKVVDELVKVMGRHKPENIVIEMARENOTTQ |
| | KGQKNSRERMKRIEEGIKELGSQILKEHPVENTQLQNEKLYLYYLONGRDMYVDQELDINRLSDYDVDXI |
| | VPQSFLKDDSIDNKVLTRSDKNRGKSDNVPSEEVVKKMKNYWRQLLNAKLITQRKFDNLTKAERGGLSEL |
| | DKAGFIKRQLVETROITKHVAQILDSRMNTKYDENDKLIREVKVITLKSKLVSDFRKDFQFYKVREINNY |
| | HHAHDAYLNAVVGTALIKKYPKLESEFVYGDYKVYDVRKMIAKSEQEIGKATAKYFFYSNIMNFFKTEIT |
| | LANGEIRKRPLIETNGETGEIVWDKGRDFATVRKVLSMPQVNIVKKTEVQTGGFSKESILPKRNSDKLIA |
| | RKKDWDPKKYGGFDSPTVAYSVLVVAKVEKGKSKKLKSVKELLGITIMERSSFEKNPIDFLEAKGYKEVK |
| | KDLIIKLPKYSLFELENGRKRMLASAGELQKGNELALPSKYVNFLYLASHYEKLKGSPEDNEQKQLFVEO |
| | HKHYLDEIIEQISEFSKRVILADANLDKVLSAYNKHRDKPIREQAENIIHLFTLTNLGAPAAFKYFDTTI |
| | DRKRYTSTKEVLDATLIHQSITGLYETRIDLSQLGGD (SEQ ID NO: 41) |
| Cas9 nickase | DKKYSIGLDIGTNSVGWAVITDEYKVPSKKFKVLGNTDRHSIKKNLIGALLFDSGETAEATRLKRTARRR |
| (Met minus) | YTRRKNRICYLQEIFSNEMAKVDDSFFHRLEESFLVEEDKKHERHPIFGNIVDEVAYHEKYPTIYHLRKK |
| Streptococcus | LVDSTDKADLRLIYLALAHMIKFRGHFLIEGDLNPDNSDVDKLFIQLVQTYNQLFEENPINASGVDAKAI |
| pyogenes | LSARLSKSRRLENLIAQLPGEKKNGLFGNLIALSLGLTPNFKSNFDLAEDAKLQLSKDTYDDDLDNLLAQ |
| Q99ZW2 Cas9 | IGDQYADLFLAAKNLSDAILLSDILRVNTEITKAPLSASMIKRYDEHHQDLTLLKALVRQQLPEKYKEIF |
| with H840A | FDQSKNGYAGYIDGGASQEEFYKFIKPILEKMDGTEELLVKLNREDLLRKQRTFDNGSIPHQIHLGELHA |
| | ILRRQEDFYPFLKDNREKIEKILTFRIPYYVGPLARGNSRFAWMTRKSEETITPWNFEEVVDKGASAQSF |
| | IERMTNFDKNLPNEKVLPKHSLLYEYFTVYNELTKVKYVTEGMRKPAFLSGEQKKAIVDLLFKTNRKVTV |
| | KQLKEDYFKKIECFDSVEISGVEDRFNASLGTYHDLLKIIKDKDFLDNEENEDILEDIVLTLTLFEDREM |
| | IEERLKTYAHLFDDKVMKQLKRRRYTGWGRLSRKLINGIRDKQSGKTILDFLKSDGFANRNFMQLIHDDS |
| | LTFKEDIQKAQVSGQGDSLHEHIANLAGSPAIKKGILQTVKVVDELVKVMGRHKPENIVIEMARENQTTQ |
| | KGQKNSRERMKRIEEGIKELGSQILKEHPVENTQLQNEKLYLYYLQNGRDMYVDQELDINRLSDYDVDAI |
| | VPQSFLKDDSIDNKVLTRSDKNRGKSDNVPSEEVVKKMKNYWRQLLNAKLITQRKFDNLTKAERGGLSEL |
| | DKAGFIKRQLVETRQITKHVAQTLDSRMNTKYDENDKLIREVKVITLKSKLVSDFRKDFQFYKVREINNY |
| | HHAHDAYLNAVVGTALIKKYPKLESEFVYGDYKVYDVRKMIAKSEQEIGKATAKYFFYSNIMNFFKTEIT |
| | LANGEIRKRPLIETNGETGEIVWDKGRDFATVRKVLSMPQVNIVKKTEVQTGGFSKESILPKRNSDKLIA |
| | RKKDWDPKKYGGFDSPTVAYSVLVVAKVEKGKSKKLKSVKELLGITIMERSSFEKNPIDFLEAKGYKEVK |
| | KDLIIKLPKYSLFELENGRKRMLASAGELQKGNELALPSKYVNFLYLASHYEKLKGSPEDNEQKQLFVEQ |
| | HKHYLDEIIEQISEFSKRVILADANLDKVLSAYNKHRDKPIREQAENIIHLFTLTNLGAPAAFKYFDTTI |
| | DRKRYTSTKEVLDATLIHQSITGLYETRIDLSQLGGD (SEQ ID NO: 42) |
| Cas9 nickase | DKKYSIGLDIGTNSVGWAVITDEYKVPSKKFKVLGNTDRHSIKKNLIGALLFDSGETAEATRLKRTARRR |
| (Met minus) | YTRRKNRICYLQEIFSNEMAKVDDSFFHRLEESFLVEEDKKHERHPIFGNIVDEVAYHEKYPTIYHLRKK |
| Streptococcus | LVDSTDKADLRLIYLALAHMIKFRGHFLIEGDLNPDNSDVDKLFIQLVQTYNQLFEENPINASGVDAKAI |
| pyogenes | LSARLSKSRRLENLIAQLPGEKKNGLFGNLIALSLGLTPNFKSNFDLAEDAKLQLSKDTYDDDLDNLLAQ |
| Q992W2 Cas9 | IGDQYADLFLAAKNLSDAILLSDILRVNTEITKAPLSASMIKRYDEHHQDLTLLKALVRQQLPEKYKEIF |
| with R863X, | FDQSKNGYAGYIDGGASQEEFYKFIKPILEKMDGTEELLVKLNREDLLRKQRTFDNGSIPHQIHLGELHA |
| wherein X is | ILRRQEDFYPFLKDNREKIEKILTFRIPYYVGPLARGNSRFAWMTRKSEETITPWNFEEVVDKGASAQSE |
| any | IERMTNFDKNLPNEKVLPKHSLLYEYFTVYNELTKVKYVTEGMRKPAFLSGEQKKAIVDLLFKTNRKVTV |
| alternate | KQLKEDYFKKIECFDSVEISGVEDRFNASLGTYHDLLKIIKDKDFLDNEENEDILEDIVLTLTLFEDREM |
| amino acid | IEERLKTYAHLFDDKVMKQLKRRRYTGWGRLSRKLINGIRDKQSGKTILDFLKSDGFANRNFMQLIHDDS |
| | LTFKEDIQKAQVSGQGDSLHEHIANLAGSPAIKKGILQTVKVVDELVKVMGRHKPENIVIEMARENQTTQ |
| | KGQKNSRERMKRIEEGIKELGSQILKEHPVENTQLQNEKLYLYYLQNGRDMYVDQELDINRLSDYDVDHI |
| | VPQSFLKDDSIDNKVLTRSDKNXGKSDNVPSEEVVKKMKNYWRQLLNAKLITQRKFDNLTKAERGGLSEL |
| | DKAGFIKRQLVETRQITKHVAQTLDSRMNTKYDENDKLIREVKVITLKSKLVSDFRKDFQFYKVREINNY |
| | HHAHDAYLNAVVGTALIKKYPKLESEFVYGDYKVYDVRKMIAKSEQEIGKATAKYFFYSNIMNFFKTEIT |
| | LANGEIRKRPLIETNGETGEIVWDKGRDFATVRKVLSMPQVNIVKKTEVQTGGFSKESILPKRNSDKLIA |
| | RKKDWDPKKYGGFDSPTVAYSVLVVAKVEKGKSKKLKSVKELLGITIMERSSFEKNPIDFLEAKGYKEVK |
| | KDLIIKLPKYSLFELENGRKRMLASAGELQKGNELALPSKYVNFLYLASHYEKLKGSPEDNEQKQLFVEQ |
| | HKHYLDEIIEQISEFSKRVILADANLDKVLSAYNKHRDKPIREQAENIIHLFTLTNLGAPAAFKYFDTTI |
| | DRKRYTSTKEVLDATLIHQSITGLYETRIDLSQLGGD(SEQ ID NO: 43) |
| Cas9 nickase | DKKYSIGLDIGTNSVGWAVITDEYKVPSKKFKVLGNTDRHSIKKNLIGALLFDSGETAEATRLKRTARRR |
| (Met minus) | YTRRKNRICYLQEIFSNEMAKVDDSFFHRLEESFLVEEDKKHERHPIFGNIVDEVAYHEKYPTIYHLRKK |
| Streptococcus | LVDSTDKADLRLIYLALAHMIKFRGHFLIEGDLNPDNSDVDKLFIQLVQTYNQLFEENPINASGVDAKAI |
| pyogenes | LSARLSKSRRLENLIAQLPGEKKNGLFGNLIALSLGLTPNFKSNFDLAEDAKLQLSKDTYDDDLDNLLAQ |
| Q99ZW2 Cas9 | IGDQYADLFLAAKNLSDAILLSDILRVNTEITKAPLSASMIKRYDEHHQDLTLLKALVRQQLPEKYKEIF |
| with R863A | FDQSKNGYAGYIDGGASQEEFYKFIKPILEKMDGTEELLVKLNREDLLRKQRTFDNGSIPHQIHLGELHA |
| | ILRRQEDFYPFLKDNREKIEKILTFRIPYYVGPLARGNSRFAWMTRKSEETITPWNFEEVVDKGASAQSE |
| | IERMTNFDKNLPNEKVLPKHSLLYEYFTVYNELTKVKYVTEGMRKPAFLSGEQKKAIVDLLFKTNRKVTV |
| | KQLKEDYFKKIECFDSVEISGVEDRFNASLGTYHDLLKIIKDKDFLDNEENEDILEDIVLTLTLFEDREM |
| | IEERLKTYAHLFDDKVMKQLKRRRYTGWGRLSRKLINGIRDKQSGKTILDFLKSDGFANRNFMQLIHDDS |
| | LTFKEDIQKAQVSGQGDSLHEHIANLAGSPAIKKGILQTVKVVDELVKVMGRHKPENIVIEMARENQTTQ |
| | KGQKNSRERMKRIEEGIKELGSQILKEHPVENTQLQNEKLYLYYLQNGRDMYVDQELDINRLSDYDVDHI |
| | VPQSFLKDDSIDNKVLTRSDKNAGKSDNVPSEEVVKKMKNYWRQLLNAKLITQRKFDNLTKAERGGLSEL |
| | DKAGFIKRQLVETRQITKHVAQTLDSRMNTKYDENDKLIREVKVITLKSKLVSDFRKDFQFYKVREINNY |
| | HHAHDAYLNAVVGTALIKKYPKLESEFVYGDYKVYDVRKMIAKSEQEIGKATAKYFFYSNIMNFFKTEIT |
| | LANGEIRKRPLIETNGETGEIVWDKGRDFATVRKVLSMPQVNIVKKTEVQTGGFSKESILPKRNSDKLIA |
| | RKKDWDPKKYGGFDSPTVAYSVLVVAKVEKGKSKKLKSVKELLGITIMERSSFEKNPIDFLEAKGYKEVK |
| | KDLIIKLPKYSLFELENGRKRMLASAGELQKGNELALPSKYVNFLYLASHYEKLKGSPEDNEQKQLFVEQ |
| | HKHYLDEIIEQISEFSKRVILADANLDKVLSAYNKHRDKPIREQAENIIHLFTLTNLGAPAAFKYFDTTI |
| | DRKRYTSTKEVLDATLIHQSITGLYETRIDLSQLGGD (SEQ ID NO: 44) |

### (5) Other Cas9 Variants

[0204] Besides dead Cas9 and Cas9 nickase variants, the Cas9 proteins used herein may also include other “Cas9 variants” having at least about 70% identical, at least about 80% identical, at least about 90% identical, at least about 95% identical, at least about 96% identical, at least about 97% identical, at least about 98% identical, at least about 99% identical, at least about 99.5% identical, or at least about 99.9% identical to any reference Cas9 protein, including any wild type Cas9, or mutant Cas9 (e.g., a dead Cas9 or Cas9 nickase), or fragment Cas9, or circular permutant Cas9, or other variant of Cas9 disclosed herein or known in the art. In some embodiments, a Cas9 variant may have 1, 2, 3, 4, 5, 6, 7, 8, 9, 10, 11, 12, 13, 14, 15, 16, 17, 18, 19, 20, 21, 22, 21, 24, 25, 26, 27, 28, 29, 30, 31, 32, 33, 34, 35, 36, 37, 38, 39, 40, 41, 42, 43, 44, 45, 46, 47, 48, 49, 50 or more amino acid changes compared to a reference Cas9. In some embodiments, the Cas9 variant comprises a fragment of a reference Cas9 (e.g., a gRNA binding domain or a DNA-cleavage domain), such that the fragment is at least about 70% identical, at least about 80% identical, at least about 90% identical, at least about 95% identical, at least about 96% identical, at least about 97% identical, at least about 98% identical, at least about 99% identical, at least about 99.5% identical, or at least about 99.9% identical to the corresponding fragment of wild type Cas9. In some embodiments, the fragment is is at least 30%, at least 35%, at least 40%, at least 45%, at least 50%, at least 55%, at least 60%, at least 65%, at least 70%, at least 75%, at least 80%, at least 85%, at least 90%, at least 95% identical, at least 96%, at least 97%, at least 98%, at least 99%, or at least 99.5% of the amino acid length of a corresponding wild type Cas9 (e.g., SEQ ID NO: 5).

[0205] In some embodiments, the disclosure also may utilize Cas9 fragments which retain their functionality and which are fragments of any herein disclosed Cas9 protein. In some embodiments, the Cas9 fragment is at least 100 amino acids in length. In some embodiments, the fragment is at least 100, 150, 200, 250, 300, 350, 400, 450, 500, 550, 600, 650, 700, 750, 800, 850, 900, 950, 1000, 1050, 1100, 1150, 1200, 1250, or at least 1300 amino acids in length.

[0206] In various embodiments, the base editors disclosed herein may comprise one of the Cas9 variants described as follows, or a Cas9 variant thereof having at least about 70% identical, at least about 80% identical, at least about 90% identical, at least about 95% identical, at least about 96% identical, at least about 97% identical, at least about 98% identical, at least about 99% identical, at least about 99.5% identical, or at least about 99.9% identical to any reference Cas9 variants.

### (6) Small-Sized Cas9 Variants

[0207] In some embodiments, the base editors contemplated herein can include a Cas9 protein that is of smaller molecular weight than the canonical SpCas9 sequence. In some embodiments, the smaller-sized Cas9 variants may facilitate delivery to cells, e.g., by an expression vector, nanoparticle, or other means of delivery. In certain embodiments, the smaller-sized Cas9 variants can include enzymes categorized as type II enzymes of the Class 2 CRISPR-Cas systems. In some embodiments, the smaller-sized Cas9 variants can include enzymes categorized as type V enzymes of the Class 2 CRISPR-Cas systems. In other embodiments, the smaller-sized Cas9 variants can include enzymes categorized as type VI enzymes of the Class 2 CRISPR-Cas systems.

[0208] The canonical SpCas9 protein is 1368 amino acids in length and has a predicted molecular weight of 158 kilodaltons. The term “small-sized Cas9 variant”, as used herein, refers to any Cas9 variant—naturally occurring, engineered, or otherwise—that is less than at least 1300 amino acids, or at least less than 1290 amino acids, or than less than 1280 amino acids, or less than 1270 amino acid, or less than 1260 amino acid, or less than 1250 amino acids, or less than 1240 amino acids, or less than 1230 amino acids, or less than 1220 amino acids, or less than 1210 amino acids, or less than 1200 amino acids, or less than 1190 amino acids, or less than 1180 amino acids, or less than 1170 amino acids, or less than 1160 amino acids, or less than 1150 amino acids, or less than 1140 amino acids, or less than 1130 amino acids, or less than 1120 amino acids, or less than 1110 amino acids, or less than 1100 amino acids, or less than 1050 amino acids, or less than 1000 amino acids, or less than 950 amino acids, or less than 900 amino acids, or less than 850 amino acids, or less than 800 amino acids, or less than 750 amino acids, or less than 700 amino acids, or less than 650 amino acids, or less than 600 amino acids, or less than 550 amino acids, or less than 500 amino acids, but at least larger than about 400 amino acids and retaining the required functions of the Cas9 protein. The Cas9 variants can include those categorized as type II, type V, or type VI enzymes of the Class 2 CRISPR-Cas system.

[0209] In various embodiments, the base editors disclosed herein may comprise one of the small-sized Cas9 variants described as follows, or a Cas9 variant thereof having at least about 70% identical, at least about 80% identical, at least about 90% identical, at least about 95% identical, at least about 96% identical, at least about 97% identical, at least about 98% identical, at least about 99% identical, at least about 99.5% identical, or at least about 99.9% identical to any reference small-sized Cas9 protein.

| | | SEQ |
|---|---|---|
| Description | Sequence | ID NO: |
| SaCas9 | MGKRNYILGLDIGITSVGYGIIDYETRDVIDAGVRLFKEANVENNEGRRSKRGARRLKRR | 45 |
| Streptococcus | RRHRIQRVKKLLFDYNLLTDHSELSGINPYEARVKGLSQKLSEEEFSAALLHLAKRRGVH | |
| pyogenes | NVNEVEEDTGNELSTKEQISRNSKALEEKYVAELQLERLKKDGEVRGSINRFKTSDYVKE | |
| 1053 AA | AKQLLKVQKAYHQLDQSFIDTYIDLLETRRTYYEGPGEGSPFGWKDIKEWYEMLMGHCTY | |
| 123 kDa | FPEELRSVKYAYNADLYNALNDLNNLVITRDENEKLEYYEKFQIIENVFKQKKKPTLKQI | |
| | AKEILVNEEDIKGYRVTSTGKPEFTNLKVYHDIKDITARKEIIENAELLDQIAKILTIYQ | |
| | SSEDIQEELTNLNSELTQEEIEQISNLKGYTGTHNLSLKAINLILDELWHTNDNQIAIFN | |
| | RLKLVPKKVDLSQQKEIPTTLVDDFILSPVVKRSFIQSIKVINAIIKKYGLPNDIIIELA | |
| | REKNSKDAQKMINEMQKRNRQTNERIEEIIRTTGKENAKYLIEKIKLHDMQEGKCLYSLE | |
| | AIPLEDLLNNPFNYEVDHIIPRSVSFDNSFNNKVLVKQEENSKKGNRTPFQYLSSSDSKI | |
| | SYETFKKHILNLAKGKGRISKTKKEYLLEERDINRFSVQKDFINRNLVDTRYATRGLMNL | |
| | LRSYFRVNNLDVKVKSINGGFTSFLRRKWKFKKERNKGYKHHAEDALIIANADFIFKEWK | |
| | KLDKAKKVMENQMFEEKQAESMPEIETEQEYKEIFITPHQIKHIKDFKDYKYSHRVDKKP | |
| | NRKLINDTLYSTRKDDKGNTLIVNNLNGLYDKDNDKLKKLINKSPEKLLMYHHDPQTYQK | |
| | LKLIMEQYGDEKNPLYKYYEETGNYLTKYSKKDNGPVIKKIKYYGNKLNAHLDITDDYPN | |
| | SRNKVVKLSLKPYRFDVYLDNGVYKFVTVKNLDVIKKENYYEVNSKCYEEAKKLKKISNQ | |
| | AEFIASFYKNDLIKINGELYRVIGVNNDLLNRIEVNMIDITYREYLENMNDKRPPHIIKT | |
| | IASKTQSIKKYSTDILGNLYEVKSKKHPQIIKK | |
| NmeCas9 | MAAFKPNSINYILGLDIGIASVGWAMVEIDEEENPIRLIDLGVRVFERAEVPKTGDSLAM | 46 |
| N. | ARRLARSVRRLTRRRAHRLLRTRRLLKREGVLQAANFDENGLIKSLPNTPWQLRAAALDR | |
| meningitidis | KLTPLEWSAVLLHLIKHRGYLSQRKNEGETADKELGALLKGVAGNAHALQTGDFRTPAEL | |
| 1083 AA | ALNKFEKESGHIRNQRSDYSHTFSRKDLQAELILLFEKQKEFGNPHVSGGLKEGIETLLM | |
| 124.5 kDa | TQRPALSGDAVQKMLGHCTFEPAEPKAAKNTYTAERFIWLTKLNNLRILEQGSERPLTDT | |
| | ERATLMDEPYRKSKLTYAQARKLLGLEDTAFFKGLRYGKDNAEASTLMEMKAYHAISRAL | |
| | EKEGLKDKKSPLNLSPELQDEIGTAFSLFKTDEDITGRLKDRIQPEILEALLKHISFDKF | |
| | VOISLKALRRIVPLMEQGKRYDEACAEIYGDHYGKKNTEEKIYLPPIPADEIRNPVVLRA | |
| | LSQARKVINGVVRRYGSPARIHIETAREVGKSFKDRKEIEKRQEENRKDREKAAAKFREY | |
| | FPNFVGEPKSKDILKLRLYEQQHGKCLYSGKEINLGRLNEKGYVEIDAALPFSRTWDDSF | |
| | NNKVLVLGSENQNKGNQTPYEYFNGKDNSREWQEFKARVETSRFPRSKKQRILLQKFDED | |
| | GFKERNLNDTRYVNRFLCQFVADRMRLTGKGKKRVFASNGQITNLLRGFWGLRKVRAEND | |
| | RHHALDAVVVACSTVAMQQKITRFVRYKEMNAFDGKTIDKETGEVLHQKTHFPQPWEFFA | |
| | QEVMIRVFGKPDGKPEFEEADTLEKLRTLLAEKLSSRPEAVHEYVTPLFVSRAPNRKMSG | |
| | QGHMETVKSAKRLDEGVSVLRVPLTQLKLKDLEKMVNREREPKLYEALKARLEAHKDDPA | |
| | KAFAEPFYKYDKAGNRTQQVKAVRVEQVQKTGVWVRNHNGIADNATMVRVDVFEKGDKYY | |
| | LVPIYSWQVAKGILPDRAVVQGKDEEDWQLIDDSFNFKFSLHPNDLVEVITKKARMFGYF | |
| | ASCHRGTGNINIRIHDLDHKIGKNGILEGIGVKTALSFQKYQIDELGKEIRPCRLKKRPP | |
| | VR | |
| CjCas9 | MARILAFDIGISSIGWAFSENDELKDCGVRIFTKVENPKTGESLALPRRLARSARKRLAR | 47 |
| C. jejuni | RKARLNHLKHLIANEFKLNYEDYQSFDESLAKAYKGSLISPYELRFRALNELLSKQDFAR | |
| 984 AA | VILHIAKRRGYDDIKNSDDKEKGAILKAIKQNEEKLANYQSVGEYLYKEYFQKFKENSKE | |
| 114.9 kDa | FTNVRNKKESYERCIAQSFLKDELKLIFKKQREFGFSFSKKFEEEVLSVAFYKRALKDFS | |
| | HLVGNCSFFTDEKRAPKNSPLAFMFVALTRIINLLNNLKNTEGILYTKDDLNALLNEVLK | |
| | NGTLTYKQTKKLLGLSDDYEFKGEKGTYFIEFKKYKEFIKALGEHNLSQDDLNEIAKDIT | |
| | LIKDEIKLKKALAKYDLNQNQIDSLSKLEFKDHLNISFKALKLVTPLMLEGKKYDEACNE | |
| | LNLKVAINEDKKDFLPAFNETYYKDEVTNPVVLRAIKEYRKVLNALLKKYGKVHKINIEL | |
| | AREVGKNHSQRAKIEKEQNENYKAKKDAELECEKLGLKINSKNILKLRLFKEQKEFCAYS | |
| | GEKIKISDLQDEKMLEIDHIYPYSRSFDDSYMNKVLVFTKQNQEKLNQTPFEAFGNDSAK | |
| | WQKIEVLAKNLPTKKQKRILDKNYKDKEQKNFKDRNLNDTRYIARLVLNYTKDYLDFLPL | |
| | SDDENTKLNDTQKGSKVHVEAKSGMLTSALRHTWGFSAKDRNNHLHHAIDAVIIAYANNS | |
| | IVKAFSDFKKEQESNSAELYAKKISELDYKNKRKFFEPFSGFRQKVLDKIDEIFVSKPER | |
| | KKPSGALHEETFRKEEEFYQSYGGKEGVLKALELGKIRKVNGKIVKNGDMFRVDIFKHKK | |
| | TNKFYAVPIYTMDFALKVLPNKAVARSKKGEIKDWILMDENYEFCFSLYKDSLILIQTKD | |
| | MQEPEFVYYNAFTSSTVSLIVSKHDNKFETLSKNQKILFKNANEKEVIAKSIGIQNLKVF | |
| | EKYIVSALGEVTKAEFRQREDFKK | |
| GeoCas9 | MRYKIGLDIGITSVGWAVMNLDIPRIEDLGVRIFDRAENPQTGESLALPRRLARSARRRL | 48 |
| G. | RRRKHRLERIRRLVIREGILTKEELDKLFEEKHEIDVWQLRVEALDRKLNNDELARVLLH | |
| stearothermo- | LAKRRGFKSNRKSERSNKENSTMLKHIEENRAILSSYRTVGEMIVKDPKFALHKRNKGEN | |
| philus | YTNTIARDDLEREIRLIFSKQREFGNMSCTEEFENEYITIWASQRPVASKDDIEKKVGFC | |
| 1087 AA | TFEPKEKRAPKATYTFQSFIAWEHINKLRLISPSGARGLTDEERRLLYEQAFQKNKITYH | |
| 127 kDa | DIRTLLHLPDDTYFKGIVYDRGESRKQNENIRFLELDAYHQIRKAVDKVYGKGKSSSFLP | |
| | IDFDTFGYALTLFKDDADIHSYLRNEYEQNGKRMPNLANKVYDNELIEELLNLSFTKFGH | |
| | LSLKALRSILPYMEQGEVYSSACERAGYTFTGPKKKQKTMLLPNIPPIANPVVMRALTQA | |
| | RKVVNAIIKKYGSPVSIHIELARDLSQTFDERRKTKKEQDENRKKNETAIRQLMEYGLTL | |
| | NPTGHDIVKFKLWSEQNGRCAYSLQPIEIERLLEPGYVEVDHVIPYSRSLDDSYTNKVLV | |
| | LTRENREKGNRIPAEYLGVGTERWQQFETFVLTNKQFSKKKRDRLLRLHYDENEETEFKN | |
| | RNLNDTRYISRFFANFIREHLKFAESDDKQKVYTVNGRVTAHLRSRWEFNKNREESDLHH | |
| | AVDAVIVACTTPSDIAKVTAFYQRREQNKELAKKTEPHFPQPWPHFADELRARLSKHPKE | |
| | SIKALNLGNYDDQKLESLQPVFVSRMPKRSVTGAAHQETLRRYVGIDERSGKIQTVVKTK | |
| | LSEIKLDASGHFPMYGKESDPRTYEAIRQRLLEHNNDPKKAFQEPLYKPKKNGEPGPVIR | |
| | TVKIIDTKNQVIPLNDGKTVAYNSNIVRVDVFEKDGKYYCVPVYTMDIMKGILPNKAIEP | |
| | NKPYSEWKEMTEDYTFRFSLYPNDLIRIELPREKTVKTAAGEEINVKDVFVYYKTIDSAN | |
| | GGLELISHDHRFSLRGVGSRTLKRFEKYQVDVLGNIYKVRGEKRVGLASSAHSKPGKTIR | |
| | PLQSTRD | |
| LbaCas12a | MSKLEKFTNCYSLSKTLRFKAIPVGKTQENIDNKRLLVEDEKRAEDYKGVKKLLDRYYLS | 49 |
| L. bacterium | FINDVLHSIKLKNLNNYISLFRKKTRTEKENKELENLEINLRKEIAKAFKGNEGYKSLFK | |
| 1228 AA | KDIIETILPEFLDDKDEIALVNSFNGFTTAFTGFFDNRENMFSEEAKSTSIAFRCINENL | |
| 143.9 kDa | TRYISNMDIFEKVDAIFDKHEVQEIKEKILNSDYDVEDFFEGEFFNFVLTQEGIDVYNAI | |
| | IGGFVTESGEKIKGLNEYINLYNQKTKQKLPKFKPLYKQVLSDRESLSFYGEGYTSDEEV | |
| | LEVFRNTLNKNSEIFSSIKKLEKLFKNFDEYSSAGIFVKNGPAISTISKDIFGEWNVIRD | |
| | KWNAEYDDIHLKKKAVVTEKYEDDRRKSFKKIGSFSLEQLQEYADADLSVVEKLKEIIIO | |
| | KVDEIYKVYGSSEKLFDADFVLEKSLKKNDAVVAIMKDLLDSVKSFENYIKAFFGEGKET | |
| | NRDESFYGDFVLAYDILLKVDHIYDAIRNYVTQKPYSKDKFKLYFQNPQFMGGWDKDKET | |
| | DYRATILRYGSKYYLAIMDKKYAKCLQKIDKDDVNGNYEKINYKLLPGPNKMLPKVFFSK | |
| | KWMAYYNPSEDIQKIYKNGTFKKGDMFNLNDCHKLIDFFKDSISRYPKWSNAYDFNFSET | |
| | EKYKDIAGFYREVEEQGYKVSFESASKKEVDKLVEEGKLYMFQIYNKDFSDKSHGTPNLH | |
| | TMYFKLLFDENNHGQIRLSGGAELFMRRASLKKEELVVHPANSPIANKNPDNPKKTTTLS | |
| | YDVYKDKRFSEDQYELHIPIAINKCPKNIFKINTEVRVLLKHDDNPYVIGIDRGERNLLY | |
| | IVVVDGKGNIVEQYSLNEIINNFNGIRIKTDYHSLLDKKEKERFEARQNWTSIENIKELK | |
| | AGYISQVVHKICELVEKYDAVIALEDLNSGFKNSRVKVEKQVYQKFEKMLIDKLNYMVDK | |
| | KSNPCATGGALKGYQITNKFESFKSMSTQNGFIFYIPAWLTSKIDPSTGFVNLLKTKYTS | |
| | LADSKKFISSFDRIMYVPEEDLFEFALDYKNFSRTDADYIKKWKLYSYGNRIRIFRNPKK | |
| | NNVFDWEEVCLTSAYKELFNKYGINYQQGDIRALLCEQSDKAFYSSFMALMSLMLQMRNS | |
| | ITGRTDVDFLISPVKNSDGIFYDSRNYEAQENAILPKNADANGAYNIARKVLWAIGQFKK | |
| | AEDEKLDKVKIAISNKEWLEYAQTSVKH | |
| BhCas12b | MATRSFILKIEPNEEVKKGLWKTHEVLNHGIAYYMNILKLIRQEAIYEHHEQDPKNPKKV | 50 |
| B. hisashii | SKAEIQAELWDFVLKMQKCNSFTHEVDKDEVFNILRELYEELVPSSVEKKGEANQLSNKF | |
| 1108 AA | LYPLVDPNSQSGKGTASSGRKPRWYNLKIAGDPSWEEEKKKWEEDKKKDPLAKILGKLAE | |
| 130.4 kDa | YGLIPLFIPYTDSNEPIVKEIKWMEKSRNQSVRRLDKDMFIQALERFLSWESWNLKVKEE | |
| | YEKVEKEYKTLEERIKEDIQALKALEQYEKERQEQLLRDTLNTNEYRLSKRGLRGWREII | |
| | QKWLKMDENEPSEKYLEVFKDYQRKHPREAGDYSVYEFLSKKENHFIWRNHPEYPYLYAT | |
| | FCEIDKKKKDAKQQATFTLADPINHPLWVRFEERSGSNLNKYRILTEQLHTEKLKKKLTV | |
| | QLDRLIYPTESGGWEEKGKVDIVLLPSRQFYNQIFLDIEEKGKHAFTYKDESIKFPLKGT | |
| | LGGARVQFDRDHLRRYPHKVESGNVGRIYFNMTVNIEPTESPVSKSLKIHRDDFPKVVNF | |
| | KPKELTEWIKDSKGKKLKSGIESLEIGLRVMSIDLGQRQAAAASIFEVVDQKPDIEGKLF | |
| | FPIKGTELYAVHRASFNIKLPGETLVKSREVLRKAREDNLKLMNQKLNFLRNVLHFQQFE | |
| | DITEREKRVTKWISRQENSDVPLVYQDELIQIRELMYKPYKDWVAFLKQLHKRLEVEIGK | |
| | EVKHWRKSLSDGRKGLYGISLKNIDEIDRTRKFLLRWSLRPTEPGEVRRLEPGQRFAIDQ | |
| | LNHLNALKEDRLKKMANTIIMHALGYCYDVRKKKWQAKNPACQIILFEDLSNYNPYEERS | |
| | RFENSKLMKWSRREIPRQVALQGEIYGLQVGEVGAQFSSRFHAKTGSPGIRCSVVTKEKL | |
| | QDNRFFKNLQREGRLTLDKIAVLKEGDLYPDKGGEKFISLSKDRKCVTTHADINAAQNLQ | |
| | KRFWTRTHGFYKVYCKAYQVDGQTVYIPESKDQKQKIIEEFGEGYFILKDGVYEWVNAGK | |
| | LKIKKGSSKQSSSELVDSDILKDSFDLASELKGEKLMLYRDPSGNVFPSDKWMAAGVFFG | |
| | KLERILISKLTNQYSISTIEDDSSKQSM | |

### (7) Cas9 Equivalents

[0210] In some embodiments, the base editors described herein can include any Cas9 equivalent. As used herein, the term “Cas9 equivalent” is a broad term that encompasses any napDNAbp protein that serves the same function as Cas9 in the present base editors despite that its amino acid primary sequence and/or its three-dimensional structure may be different and/or unrelated from an evolutionary standpoint. Thus, while Cas9 equivalents include any Cas9 ortholog, homolog, mutant, or variant described or embraced herein that are evolutionarily related, the Cas9 equivalents also embrace proteins that may have evolved through convergent evolution processes to have the same or similar function as Cas9, but which do not necessarily have any similarity with regard to amino acid sequence and/or three dimensional structure. The base editors described here embrace any Cas9 equivalent that would provide the same or similar function as Cas9 despite that the Cas9 equivalent may be based on a protein that arose through convergent evolution. For instance, if Cas9 refers to a type II enzyme of the CRISPR-Cas system, a Cas9 equivalent can refer to a type V or type VI enzyme of the CRISPR-Cas system.

[0211] For example, Cas12e (CasX) is a Cas9 equivalent that reportedly has the same function as Cas9 but which evolved through convergent evolution. Thus, the Cas12e (CasX) protein described in Liu et al., “CasX enzymes comprises a distinct family of RNA-guided genome editors,” Nature, 2019, Vol. 566: 218-223, is contemplated to be used with the base editors described herein. In addition, any variant or modification of Cas12e (CasX) is conceivable and within the scope of the present disclosure.

[0212] Cas9 is a bacterial enzyme that evolved in a wide variety of species. However, the Cas9 equivalents contemplated herein may also be obtained from archaea, which constitute a domain and kingdom of single-celled prokaryotic microbes different from bacteria.

[0213] In some embodiments, Cas9 equivalents may refer to Cas12e (CasX) or Cas12d (CasY), which have been described in, for example, Burstein et al., “New CRISPR-Cas systems from uncultivated microbes.” Cell Res. 2017 Feb. 21. doi: 10.1038/cr.2017.21, the entire contents of which is hereby incorporated by reference. Using genome-resolved metagenomics, a number of CRISPR-Cas systems were identified, including the first reported Cas9 in the archaeal domain of life. This divergent Cas9 protein was found in little-studied nanoarchaea as part of an active CRISPR-Cas system. In bacteria, two previously unknown systems were discovered, CRISPR-Cas12e and CRISPR-Cas12d, which are among the most compact systems yet discovered. In some embodiments, Cas9 refers to Cas12e, or a variant of Cas12e. In some embodiments, Cas9 refers to a Cas12d, or a variant of Cas12d. It should be appreciated that other RNA-guided DNA binding proteins may be used as a nucleic acid programmable DNA binding protein (napDNAbp), and are within the scope of this disclosure. Also see Liu et al., “CasX enzymes comprises a distinct family of RNA-guided genome editors,” Nature, 2019, Vol. 566: 218-223. Any of these Cas9 equivalents are contemplated.

[0214] In some embodiments, the Cas9 equivalent comprises an amino acid sequence that is at least 85%, at least 90%, at least 91%, at least 92%, at least 93%, at least 94%, at least 95%, at least 96%, at least 97%, at least 98%, at least 99%, or at least 99.5% identical to a naturally-occurring Cas12e (CasX) or Cas12d (CasY) protein. In some embodiments, the napDNAbp is a naturally-occurring Cas12e (CasX) or Cas12d (CasY) protein. In some embodiments, the napDNAbp comprises an amino acid sequence that is at least 85%, at least 90%, at least 91%, at least 92%, at least 93%, at least 94%, at least 95%, at least 96%, at least 97%, at least 98%, at least 99%, or at least 99.5% identical to a wild-type Cas moiety or any Cas moiety provided herein.

[0215] In various embodiments, the nucleic acid programmable DNA binding proteins include, without limitation, Cas9 (e.g., dCas9 and nCas9), C2C3Cas12e (CasX), Cas12d (CasY), Cas12a (Cpf1), Cas12b1 (C2c1), Cas13a (C2c2), Cas12c (C2c3), Argonaute. One example of a nucleic acid programmable DNA-binding protein that has different PAM specificity than Cas9 is Clustered Regularly Interspaced Short Palindromic Repeats from Prevotella and Francisella 1 (i.e., Cas12a (Cpf1)). Similar to Cas9, Cas12a (Cpf1) is also a Class 2 CRISPR effector, but it is a member of the type V subgroup of enzymes, rather than the type II subgroup. It has been shown that Cas12a (Cpf1) mediates robust DNA interference with features distinct from Cas9. Cas12a (Cpf1) is a single RNA-guided endonuclease lacking tracrRNA, and it utilizes a T-rich protospacer-adjacent motif (TTN, TTTN, or YTN). Moreover, Cpf1 cleaves DNA via a staggered DNA double-stranded break. Out of 16 Cpf1-family proteins, two enzymes from Acidaminococcus and Lachnospiraceae are shown to have efficient genome-editing activity in human cells. Cpf1 proteins are known in the art and have been described previously, for example Yamano et al., “Crystal structure of Cpf1 in complex with guide RNA and target DNA.” Cell (165) 2016, p. 949-962; the entire contents of which is hereby incorporated by reference.

[0216] In still other embodiments, the Cas protein may include any CRISPR associated protein, including but not limited to, Cas12a, Cas12b1, Cas1, Cas1B, Cas2, Cas3, Cas4, Cas5, Cas6, Cas7, Cas8, Cas9 (also known as Csn1 and Csx12), Cas10, Csy1, Csy2, Csy3, Cse1, Cse2, Csc1, Csc2, Csa5, Csn2. Csm2, Csm3, Csm4, Csm5, Csm6, Cmr1, Cmr3, Cmr4, Cmr5, Cmr6, Csb1, Csb2, Csb3, Csx17, Csx14, Csx10, Csx16, CsaX, Csx3, Csx1, Csx15, Csf1, Csf2, Csf3, Csf4, homologs thereof, or modified versions thereof, and preferably comprising a nickase mutation (e.g., a mutation corresponding to the D10A mutation of the wild type Cas9 polypeptide of SEQ ID NO: 5).

[0217] In various other embodiments, the napDNAbp can be any of the following proteins: a Cas9, a C2c3Cas2a (Cpf1), a Cas12e (CasX), a Cas12d (CasY), a Cas12b1 (C2c1), a Cas3a (C2c2), a Cas12c (C2), a GeoCas9, a CjCas9, a Cas12a, a Cas12b, a Cas12g, a Cas12h, a Cas12i, a Cas13b, a Cas13c, a Cas13d, a Cas14, a Csn2, an xCas9, an SpCas9-NG, a circularly permuted Cas9, or an Argonaute (Ago) domain, or a variant thereof.

[0218] Exemplary Cas9 equivalent protein sequences can include the following:

| Description | Sequence |
|---|---|
| AsCas12a | MTQFEGFTNLYQVSKTLRFELIPQGKTLKHIQEQGFIEEDKARNDHYKELKPIIDRIYKTYADQCLQLVQLD |
| (previously | WENLSAAIDSYRKEKTEETRNALIEEQATYRNAIHDYFIGRTDNLTDAINKRHAEIYKGLFKAELFNGKVLK |
| known as | QLGTVTTTEHENALLRSFDKFTTYFSGFYENRKNVFSAEDISTAIPHRIVQDNFPKFKENCHIFTRLITAVP |
| Cpf1) | SLREHFENVKKAIGIFVSTSIEEVFSFPFYNQLLTQTQIDLYNQLLGGISREAGTEKIKGLNEVLNLAIQKN |
| Acidaminococcus | DETAHIIASLPHRFIPLFKQILSDRNTLSFILEEFKSDEEVIQSFCKYKTLLRNENVLETAEALFNELNSID |
| sp. | LTHIFISHKKLETISSALCDHWDTLRNALYERRISELTGKITKSAKEKVQRSLKHEDINLQEIISAAGKELS |
| (strain | EAFKQKTSEILSHAHAALDQPLPTTLKKQEEKEILKSQLDSLLGLYHLLDWFAVDESNEVDPEFSARLTGIK |
| BV3L6) | LEMEPSLSFYNKARNYATKKPYSVEKFKLNFQMPTLASGWDVNKEKNNGAILFVKNGLYYLGIMPKQKGRYK |
| UniProtKB | ALSFEPTEKTSEGFDKMYYDYFPDAAKMIPKCSTQLKAVTAHFQTHTTPILLSNNFIEPLEITKEIYDLNNP |
| U2UMQ6 | EKEPKKFQTAYAKKTGDQKGYREALCKWIDFTRDFLSKYTKTTSIDLSSLRPSSQYKDLGEYYAELNPLLYH |
| | ISFQRIAEKEIMDAVETGKLYLFQIYNKDFAKGHHGKPNLHTLYWTGLFSPENLAKTSIKLNGQAELFYRPK |
| | SRMKRMAHRLGEKMLNKKLKDQKTPIPDTLYQELYDYVNHRLSHDLSDEARALLPNVITKEVSHEIIKDRRF |
| | TSDKFFFHVPITLNYQAANSPSKFNQRVNAYLKEHPETPIIGIDRGERNLIYITVIDSTGKILEQRSLNTIQ |
| | QFDYQKKLDNREKERVAARQAWSVVGTIKDLKQGYLSQVIHEIVDLMIHYQAVVVLENLNFGFKSKRTGIAE |
| | KAVYQQFEKMLIDKLNCLVLKDYPAEKVGGVLNPYQLTDQFTSFAKMGTQSGFLFYVPAPYTSKIDPLTGFV |
| | DPFVWKTIKNHESRKHFLEGFDFLHYDVKTGDFILHFKMNRNLSFQRGLPGFMPAWDIVFEKNETQFDAKGT |
| | PFIAGKRIVPVIENHRFTGRYRDLYPANELIALLEEKGIVFRDGSNILPKLLENDDSHAIDTMVALIRSVLQ |
| | MRNSNAATGEDYINSPVRDLNGVCFDSRFQNPEWPMDADANGAYHIALKGQLLLNHLKESKDLKLQNGISNQ |
| | DWLAYIQELRN (SEQ ID NO: 51) |
| AsCas12a | MTQFEGFTNLYQVSKTLRFELIPQGKTLKHIQEQGFIEEDKARNDHYKELKPIIDRIYKTYADQCLQLVQLD |
| nickase | WENLSAAIDSYRKEKTEETRNALIEEQATYRNAIHDYFIGRTDNLTDAINKRHAEIYKGLFKAELFNGKVLK |
| (e.g., | QLGTVTTTEHENALLRSFDKFTTYFSGFYENRKNVFSAEDISTAIPHRIVQDNFPKFKENCHIFTRLITAVP |
| R1226A) | SLREHFENVKKAIGIFVSTSIEEVFSFPFYNQLLTQTQIDLYNQLLGGISREAGTEKIKGLNEVLNLAIQKN |
| | DETAHIIASLPHRFIPLFKQILSDRNTLSFILEEFKSDEEVIQSFCKYKTLLRNENVLETAEALFNELNSID |
| | LTHIFISHKKLETISSALCDHWDTLRNALYERRISELTGKITKSAKEKVQRSLKHEDINLQEIISAAGKELS |
| | EAFKQKTSEILSHAHAALDQPLPTTLKKQEEKEILKSQLDSLLGLYHLLDWFAVDESNEVDPEFSARLTGIK |
| | LEMEPSLSFYNKARNYATKKPYSVEKFKLNFQMPTLASGWDVNKEKNNGAILFVKNGLYYLGIMPKQKGRYK |
| | ALSFEPTEKTSEGFDKMYYDYFPDAAKMIPKCSTQLKAVTAHFQTHTTPILLSNNFIEPLEITKEIYDLNNP |
| | EKEPKKFQTAYAKKTGDQKGYREALCKWIDFTRDFLSKYTKTTSIDLSSLRPSSQYKDLGEYYAELNPLLYH |
| | ISFQRIAEKEIMDAVETGKLYLFQIYNKDFAKGHHGKPNLHTLYWTGLFSPENLAKTSIKLNGQAELFYRPK |
| | SRMKRMAHRLGEKMLNKKLKDQKTPIPDTLYQELYDYVNHRLSHDLSDEARALLPNVITKEVSHEIIKDRRF |
| | TSDKFFFHVPITLNYQAANSPSKFNQRVNAYLKEHPETPIIGIDRGERNLIYITVIDSTGKILEQRSLNTIQ |
| | QFDYQKKLDNREKERVAARQAWSVVGTIKDLKQGYLSQVIHEIVDLMIHYQAVVVLENLNFGFKSKRTGIAE |
| | KAVYQQFEKMLIDKLNCLVLKDYPAEKVGGVLNPYQLTDQFTSFAKMGTQSGFLFYVPAPYTSKIDPLTGFV |
| | DPFVWKTIKNHESRKHFLEGFDFLHYDVKTGDFILHFKMNRNLSFQRGLPGFMPAWDIVFEKNETQFDAKGT |
| | PFIAGKRIVPVIENHRFTGRYRDLYPANELIALLEEKGIVFRDGSNILPKLLENDDSHAIDTMVALIRSVLQ |
| | MANSNAATGEDYINSPVRDLNGVCFDSRFQNPEWPMDADANGAYHIALKGQLLLNHLKESKDLKLQNGISNQ |
| | DWLAYIQELRN (SEQ ID NO: 52) |
| LbCas12a | MNYKTGLEDFIGKESLSKTLRNALIPTESTKIHMEEMGVIRDDELRAEKQQELKEIMDDYYRTFIEEKLGQI |
| (previously | QGIQWNSLFQKMEETMEDISVRKDLDKIQNEKRKEICCYFTSDKRFKDLFNAKLITDILPNFIKDNKEYTEE |
| known as | EKAEKEQTRVLFQRFATAFTNYFNQRRNNFSEDNISTAISFRIVNENSEIHLQNMRAFQRIEQQYPEEVCGM |
| Cpf1) | EEEYKDMLQEWQMKHIYSVDFYDRELTQPGIEYYNGICGKINEHMNQFCQKNRINKNDFRMKKLHKQILCKK |
| Lachnospiraceae | SSYYEIPFRFESDQEVYDALNEFIKTMKKKEIIRRCVHLGQECDDYDLGKIYISSNKYEQISNALYGSWDTI |
| bacterium | RKCIKEEYMDALPGKGEKKEEKAEAAAKKEEYRSIADIDKIISLYGSEMDRTISAKKCITEICDMAGQISID |
| GAM79 | PLVCNSDIKLLQNKEKTTEIKTILDSFLHVYQWGQTFIVSDIIEKDSYFYSELEDVLEDFEGITTLYNHVRS |
| Ref Seq. | YVTQKPYSTVKFKLHFGSPTLANGWSQSKEYDNNAILLMRDQKFYLGIFNVRNKPDKQIIKGHEKEEKGDYK |
| WP_119623382.1 | KMIYNLLPGPSKMLPKVFITSRSGQETYKPSKHILDGYNEKRHIKSSPKFDLGYCWDLIDYYKECIHKHPDW |
| | KNYDFHFSDTKDYEDISGFYREVEMQGYQIKWTYISADEIQKLDEKGQIFLFQIYNKDFSVHSTGKDNLHTM |
| | YLKNLFSEENLKDIVLKLNGEAELFFRKASIKTPIVHKKGSVLVNRSYTQTVGNKEIRVSIPEEYYTEIYNY |
| | LNHIGKGKLSSEAQRYLDEGKIKSFTATKDIVKNYRYCCDHYFLHLPITINFKAKSDVAVNERTLAYIAKKE |
| | DIHIIGIDRGERNLLYISVVDVHGNIREQRSFNIVNGYDYOQKLKDREKSRDAARKNWEEIEKIKELKEGYL |
| | SMVIHYIAQLVVKYNAVVAMEDLNYGFKTGRFKVERQVYQKFETMLIEKLHYLVFKDREVCEEGGVLRGYQL |
| | TYIPESLKKVGKQCGFIFYVPAGYTSKIDPTTGFVNLFSFKNLTNRESRQDFVGKFDEIRYDRDKKMFEFSF |
| | DYNNYIKKGTILASTKWKVYTNGTRLKRIVVNGKYTSQSMEVELTDAMEKMLQRAGIEYHDGKDLKGQIVEK |
| | GIEAEIIDIFRLTVQMRNSRSESEDREYDRLISPVLNDKGEFFDTATADKTLPQDADANGAYCIALKGLYEV |
| | KQIKENWKENEQFPRNKLVQDNKTWFDFMQKKRYL (SEQ ID NO: 53) |
| PcCas12a- | MAKNFEDFKRLYSLSKTLRFEAKPIGATLDNIVKSGLLDEDEHRAASYVKVKKLIDEYHKVFIDRVLDDGCL |
| previously | PLENKGNNNSLAEYYESYVSRAQDEDAKKKFKEIQQNLRSVIAKKLTEDKAYANLFGNKLIESYKDKEDKKK |
| known at | IIDSDLIQFINTAESTQLDSMSQDEAKELVKEFWGFVTYFYGFFDNRKNMYTAEEKSTGIAYRLVNENLPKF |
| Cpf1 | IDNIEAFNRAITRPEIOENMGVLYSDFSEYLNVESIOEMFOLDYYNMLLTOKOIDVYNAIIGGKTDDEHDVK |
| Prevotella | IKGINEYINLYNQQHKDDKLPKLKALFKQILSDRNAISWLPEEFNSDQEVLNAIKDCYERLAENVLGDKVLK |
| copri | SLLGSLADYSLDGIFIRNDLQLTDISQKMFGNWGVIQNAIMQNIKRVAPARKHKESEEDYEKRIAGIFKKAD |
| Ref Seq. | SFSISYINDCLNEADPNNAYFVENYFATFGAVNTPTMQRENLFALVQNAYTEVAALLHSDYPTVKHLAQDKA |
| WP_119227726.1 | NVSKIKALLDAIKSLQHFVKPLLGKGDESDKDERFYGELASLWAELDTVTPLYNMIRNYMTRKPYSQKKIKL |
| | NFENPQLLGGWDANKEKDYATIILRRNGLYYLAIMDKDSRKLLGKAMPSDGECYEKMVYKFFKDVTTMIPKC |
| | STQLKDVQAYFKVNTDDYVLNSKAFNKPLTITKEVFDLNNVLYGKYKKFQKGYLTATGDNVGYTHAVNVWIK |
| | FCMDFLNSYDSTCIYDFSSLKPESYLSLDAFYQDANLLLYKLSFARASVSYINQLVEEGKMYLFQIYNKDFS |
| | EYSKGTPNMHTLYWKALFDERNLADVVYKLNGQAEMFYRKKSIENTHPTHPANHPILNKNKDNKKKESLFDY |
| | DLIKDRRYTVDKFMFHVPITMNFKSVGSENINQDVKAYLRHADDMHIIGIDRGERHLLYLVVIDLQGNIKEQ |
| | YSLNEIVNEYNGNTYHTNYHDLLDVREEERLKARQSWQTIENIKELKEGYLSQVIHKITQLMVRYHAIVVLE |
| | DLSKGFMRSRQKVEKQVYQKFEKMLIDKLNYLVDKKTDVSTPGGLLNAYQLTCKSDSSQKLGKQSGFLFYIP |
| | AWNTSKIDPVTGFVNLLDTHSLNSKEKIKAFFSKFDAIRYNKDKKWFEFNLDYDKFGKKAEDTRTKWTLCTR |
| | GMRIDTFRNKEKNSQWDNQEVDLTTEMKSLLEHYYIDIHGNLKDAISAQTDKAFFTGLLHILKLTLQMRNSI |
| | TGTETDYLVSPVADENGIFYDSRSCGNQLPENADANGAYNIARKGLMLIEQIKNAEDLNNVKFDISNKAWLN |
| | FAQQKPYKNG (SEQ ID NO: 54) |
| ErCas12a - | MFSAKLISDILPEFVIHNNNYSASEKEEKTQVIKLFSRFATSFKDYFKNRANCFSANDISSSSCHRIVNDNA |
| previously | EIFFSNALVYRRIVKNLSNDDINKISGDMKDSLKEMSLEEIYSYEKYGEFITQEGISFYNDICGKVNLFMNL |
| known at | YCQKNKENKNLYKLRKLHKQILCIADTSYEVPYKFESDEEVYQSVNGFLDNISSKHIVERLRKIGENYNGYN |
| Cpf1 | LDKIYIVSKFYESVSQKTYRDWETINTALEIHYNNILPGNGKSKADKVKKAVKNDLQKSITEINELVSNYKL |
| Eubacterium | CPDDNIKAETYIHEISHILNNFEAQELKYNPEIHLVESELKASELKNVLDVIMNAFHWCSVFMTEELVDKDN |
| rectale | NFYAELEEIYDEIYPVISLYNLVRNYVTQKPYSTKKIKLNFGIPTLADGWSKSKEYSNNAIILMRDNLYYLG |
| Ref Seq. | IFNAKNKPDKKIIEGNTSENKGDYKKMIYNLLPGPNKMIPKVFLSSKTGVETYKPSAYILEGYKQNKHLKSS |
| WP_119223642.1 | KDFDITFCHDLIDYFKNCIAIHPEWKNFGFDFSDTSTYEDISGFYREVELQGYKIDWTYISEKDIDLLQEKG |
| | QLYLFQIYNKDFSKKSSGNDNLHTMYLKNLFSEENLKDIVLKLNGEAEIFFRKSSIKNPIIHKKGSILVNRT |
| | YEAEEKDQFGNIQIVRKTIPENIYQELYKYFNDKSDKELSDEAAKLKNVVGHHEAATNIVKDYRYTYDKYFL |
| | HMPITINFKANKTSFINDRILQYIAKEKDLHVIGIDRGERNLIYVSVIDTCGNIVEQKSFNIVNGYDYQIKL |
| | KQQEGARQIARKEWKEIGKIKEIKEGYLSLVIHEISKMVIKYNAIIAMEDLSYGFKKGRFKVERQVYQKFET |
| | MLINKLNYLVFKDISITENGGLLKGYQLTYIPDKLKNVGHQCGCIFYVPAAYTSKIDPTTGFVNIFKFKDLT |
| | VDAKREFIKKFDSIRYDSDKNLFCFTFDYNNFITQNTVMSKSSWSVYTYGVRIKRRFVNGRFSNESDTIDIT |
| | KDMEKTLEMTDINWRDGHDLRQDIIDYEIVQHIFEIFKLTVQMRNSLSELEDRDYDRLISPVLNENNIFYDS |
| | AKAGDALPKDADANGAYCIALKGLYEIKQITENWKEDGKFSRDKLKISNKDWFDFIQNKRYL(SEQ ID |
| | NO: 55) |
| CsCas12a- | MNYKTGLEDFIGKESLSKTLRNALIPTESTKIHMEEMGVIRDDELRAEKQQELKEIMDDYYRAFIEEKLGQI |
| previously | QGIQWNSLFQKMEETMEDISVRKDLDKIQNEKRKEICCYFTSDKRFKDLFNAKLITDILPNFIKDNKEYTEE |
| known at | EKAEKEQTRVLFQRFATAFTNYFNQRRNNFSEDNISTAISFRIVNENSEIHLQNMRAFQRIEQQYPEEVCGM |
| Cpf1 | EEEYKDMLQEWQMKHIYLVDFYDRVLTQPGIEYYNGICGKINEHMNQFCQKNRINKNDFRMKKLHKQILCKK |
| Clostridiam | SSYYEIPFRFESDQEVYDALNEFIKTMKEKEIICRCVHLGQKCDDYDLGKIYISSNKYEQISNALYGSWDTI |
| sp. | RKCIKEEYMDALPGKGEKKEEKAEAAAKKEEYRSIADIDKIISLYGSEMDRTISAKKCITEICDMAGQISTD |
| AF34-10BH | PLVCNSDIKLLQNKEKTTEIKTILDSFLHVYQWGQTFIVSDIIEKDSYFYSELEDVLEDFEGITTLYNHVRS |
| Ref Seq. | YVTQKPYSTVKFKLHFGSPTLANGWSQSKEYDNNAILLMRDQKFYLGIFNVRNKPDKQIIKGHEKEEKGDYK |
| WP_118538418.1 | KMIYNLLPGPSKMLPKVFITSRSGQETYKPSKHILDGYNEKRHIKSSPKFDLGYCWDLIDYYKECIHKHPDW |
| | KNYDFHFSDTKDYEDISGFYREVEMQGYQIKWTYISADEIQKLDEKGQIFLFQIYNKDFSVHSTGKDNLHTM |
| | YLKNLFSEENLKDIVLKLNGEAELFFRKASIKTPVVHKKGSVLVNRSYTQTVGDKEIRVSIPEEYYTEIYNY |
| | LNHIGRGKLSTEAQRYLEERKIKSFTATKDIVKNYRYCCDHYFLHLPITINFKAKSDIAVNERTLAYIAKKE |
| | DIHIIGIDRGERNLLYISVVDVHGNIREQRSFNIVNGYDYOQKLKDREKSRDAARKNWEEIEKIKELKEGYL |
| | SMVIHYIAQLVVKYNAVVAMEDLNYGFKTGRFKVERQVYQKFETMLIEKLHYLVFKDREVCEEGGVLRGYQL |
| | TYIPESLKKVGKQCGFIFYVPAGYTSKIDPTTGFVNLFSFKNLTNRESRQDFVGKFDEIRYDRDKKMFEFSF |
| | DYNNYIKKGTMLASTKWKVYTNGTRLKRIVVNGKYTSQSMEVELTDAMEKMLQRAGIEYHDGKDLKGQIVEK |
| | GIEAEIIDIFRLTVQMRNSRSESEDREYDRLISPVLNDKGEFFDTATADKTLPQDADANGAYCIALKGLYEV |
| | KQIKENWKENEQFPRNKLVQDNKTWFDFMQKKRYL (SEQ ID NO: 56) |
| BhCas12b | MATRSFILKIEPNEEVKKGLWKTHEVLNHGIAYYMNILKLIRQEAIYEHHEQDPKNPKKVSKAEIQAELWDF |
| Bacillus | VLKMQKCNSFTHEVDKDEVFNILRELYEELVPSSVEKKGEANQLSNKFLYPLVDPNSQSGKGTASSGRKPRW |
| hisashii | YNLKIAGDPSWEEEKKKWEEDKKKDPLAKILGKLAEYGLIPLFIPYTDSNEPIVKEIKWMEKSRNQSVRRLD |
| Ref Seq. | KDMFIQALERFLSWESWNLKVKEEYEKVEKEYKTLEERIKEDIQALKALEQYEKERQEQLLRDTLNTNEYRL |
| WP_095142515.1 | SKRGLRGWREIIQKWLKMDENEPSEKYLEVFKDYQRKHPREAGDYSVYEFLSKKENHFIWRNHPEYPYLYAT |
| | FCEIDKKKKDAKQQATFTLADPINHPLWVRFEERSGSNLNKYRILTEQLHTEKLKKKLTVQLDRLIYPTESG |
| | GWEEKGKVDIVLLPSRQFYNQIFLDIEEKGKHAFTYKDESIKFPLKGTLGGARVQFDRDHLRRYPHKVESGN |
| | VGRIYFNMTVNIEPTESPVSKSLKIHRDDFPKVVNFKPKELTEWIKDSKGKKLKSGIESLEIGLRVMSIDLG |
| | QRQAAAASIFEVVDQKPDIEGKLFFPIKGTELYAVHRASFNIKLPGETLVKSREVLRKAREDNLKLMNQKLN |
| | FLRNVLHFQQFEDITEREKRVTKWISRQENSDVPLVYQDELIQIRELMYKPYKDWVAFLKQLHKRLEVEIGK |
| | EVKHWRKSLSDGRKGLYGISLKNIDEIDRTRKFLLRWSLRPTEPGEVRRLEPGQRFAIDQLNHLNALKEDRL |
| | KKMANTIIMHALGYCYDVRKKKWQAKNPACQIILFEDLSNYNPYEERSRFENSKLMKWSRREIPRQVALQGE |
| | IYGLQVGEVGAQFSSRFHAKTGSPGIRCSVVTKEKLQDNRFFKNLQREGRLTLDKIAVLKEGDLYPDKGGEK |
| | FISLSKDRKCVTTHADINAAQNLQKRFWTRTHGFYKVYCKAYQVDGQTVYIPESKDQKQKIIEEFGEGYFIL |
| | KDGVYEWVNAGKLKIKKGSSKQSSSELVDSDILKDSFDLASELKGEKLMLYRDPSGNVFPSDKWMAAGVFFG |
| | KLERILISKLTNQYSISTIEDDSSKQSM (SEQ ID NO: 57) |
| ThCas12b | MSEKTTQRAYTLRLNRASGECAVCQNNSCDCWHDALWATHKAVNRGAKAFGDWLLTLRGGLCHTLVEMEVPA |
| Thermomonas | KGNNPPQRPTDQERRDRRVLLALSWLSVEDEHGAPKEFIVATGRDSADDRAKKVEEKLREILEKRDFQEHEI |
| hydrothermalis | DAWLQDCGPSLKAHIREDAVWVNRRALFDAAVERIKTLTWEEAWDFLEPFFGTQYFAGIGDGKDKDDAEGPA |
| Ref Seq. | RQGEKAKDLVQKAGQWLSARFGIGTGADFMSMAEAYEKIAKWASQAQNGDNGKATIEKLACALRPSEPPTLD |
| WP_072754838 | TVLKCISGPGHKSATREYLKTLDKKSTVTQEDLNQLRKLADEDARNCRKKVGKKGKKPWADEVLKDVENSCE |
| | LTYLQDNSPARHREFSVMLDHAARRVSMAHSWIKKAEQRRRQFESDAQKLKNLQERAPSAVEWLDRFCESRS |
| | MTTGANTGSGYRIRKRAIEGWSYVVQAWAEASCDTEDKRIAAARKVQADPEIEKFGDIQLFEALAADEAICV |
| | WRDQEGTQNPSILIDYVTGKTAEHNQKRFKVPAYRHPDELRHPVFCDFGNSRWSIQFAIHKEIRDRDKGAKQ |
| | DTRQLQNRHGLKMRLWNGRSMTDVNLHWSSKRLTADLALDQNPNPNPTEVTRADRLGRAASSAFDHVKIKNV |
| | FNEKEWNGRLQAPRAELDRIAKLEEQGKTEQAEKLRKRLRWYVSFSPCLSPSGPFIVYAGQHNIQPKRSGQY |
| | APHAQANKGRARLAQLILSRLPDLRILSVDLGHRFAAACAVWETLSSDAFRREIQGLNVLAGGSGEGDLFLH |
| | VEMTGDDGKRRTVVYRRIGPDQLLDNTPHPAPWARLDRQFLIKLQGEDEGVREASNEELWTVHKLEVEVGRT |
| | VPLIDRMVRSGFGKTEKQKERLKKLRELGWISAMPNEPSAETDEKEGEIRSISRSVDELMSSALGTLRLALK |
| | RHGNRARIAFAMTADYKPMPGGQKYYFHEAKEASKNDDETKRRDNQIEFLQDALSLWHDLFSSPDWEDNEAK |
| | KLWQNHIATLPNYQTPEEISAELKRVERNKKRKENRDKLRTAAKALAENDQLRQHLHDTWKERWESDDQQWK |
| | ERLRSLKDWIFPRGKAEDNPSIRHVGGLSITRINTISGLYQILKAFKMRPEPDDLRKNIPQKGDDELENFNR |
| | RLLEARDRLREQRVKQLASRIIEAALGVGRIKIPKNGKLPKRPRTTVDTPCHAVVIESLKTYRPDDLRTRRE |
| | NRQLMQWSSAKVRKYLKEGCELYGLHFLEVPANYTSRQCSRTGLPGIRCDDVPTGDFLKAPWWRRAINTARE |
| | KNGGDAKDRFLVDLYDHLNNLQSKGEALPATVRVPRQGGNLFIAGAQLDDTNKERRAIQADLNAAANIGLRA |
| | LLDPDWRGRWWYVPCKDGTSEPALDRIEGSTAFNDVRSLPTGDNSSRRAPREIENLWRDPSGDSLESGTWSP |
| | TRAYWDTVOSRVIELLRRHAGLPTS (SEO ID NO: 58) |
| LsCas12b | MSIRSFKLKLKTKSGVNAEQLRRGLWRTHQLINDGIAYYMNWLVLLRQEDLFIRNKETNEIEKRSKEEIQAV |
| Laceyella | LLERVHKQQQRNQWSGEVDEQTLLQALRQLYEEIVPSVIGKSGNASLKARFFLGPLVDPNNKTTKDVSKSGP |
| sacchari | TPKWKKMKDAGDPNWVQEYEKYMAERQTLVRLEEMGLIPLFPMYTDEVGDIHWLPQASGYTRTWDRDMFQQA |
| WP_132221894.1 | IERLLSWESWNRRVRERRAQFEKKTHDFASRFSESDVQWMNKLREYEAQQEKSLEENAFAPNEPYALTKKAL |
| | RGWERVYHSWMRLDSAASEEAYWQEVATCQTAMRGEFGDPAIYQFLAQKENHDIWRGYPERVIDFAELNHLQ |
| | RELRRAKEDATFTLPDSVDHPLWVRYEAPGGTNIHGYDLVQDTKRNLTLILDKFILPDENGSWHEVKKVPFS |
| | LAKSKQFHRQVWLQEEQKQKKREVVFYDYSTNLPHLGTLAGAKLQWDRNFLNKRTQQQIEETGEIGKVFFNI |
| | SVDVRPAVEVKNGRLQNGLGKALTVLTHPDGTKIVTGWKAEQLEKWVGESGRVSSLGLDSLSEGLRVMSIDL |
| | GQRTSATVSVFEITKEAPDNPYKFFYQLEGTEMFAVHQRSFLLALPGENPPQKIKQMREIRWKERNRIKQQV |
| | DQLSAILRLHKKVNEDERIQAIDKLLQKVASWQLNEEIATAWNQALSQLYSKAKENDLQWNQAIKNAHHQLE |
| | PVVGKQISLWRKDLSTGRQGIAGLSLWSIEELEATKKLLTRWSKRSREPGVVKRIERFETFAKQIQHHINQV |
| | KENRLKQLANLIVMTALGYKYDQEQKKWIEVYPACQVVLFENLRSYRFSFERSRRENKKLMEWSHRSIPKLV |
| | QMQGELFGLQVADVYAAYSSRYHGRTGAPGIRCHALTEADLRNETNIIHELIEAGFIKEEHRPYLOQGDLVP |
| | WSGGELFATLQKPYDNPRILTLHADINAAQNIQKRFWHPSMWFRVNCESVMEGEIVTYVPKNKTVHKKQGKT |
| | FRFVKVEGSDVYEWAKWSKNRNKNTFSSITERKPPSSMILFRDPSGTFFKEQEWVEQKTEWGKVOSMIOAYM |
| | KKTIVORMEE (SEO ID NO: 59) |
| DtCas12b | MVLGRKDDTAELRRALWTTHEHVNLAVAEVERVLLRCRGRSYWTLDRRGDPVHVPESQVAEDALAMAREAOR |
| Dsulfonatronum | RNGWPVVGEDEEILLALRYLYEQIVPSCLLDDLGKPLKGDAQKIGTNYAGPLFDSDTCRRDEGKDVACCGPE |
| thiodismutans | HEVAGKYLGALPEWATPISKQEFDGKDASHLRFKATGGDDAFFRVSIEKANAWYEDPANQDALKNKAYNKDD |
| WP_031386437 | WKKEKDKGISSWAVKYIQKQLQLGQDPRTEVRRKLWLELGLLPLFIPVFDKTMVGNLWNRLAVRLALAHLLS |
| | WESWNHRAVQDQALARAKRDELAALFLGMEDGFAGLREYELRRNESIKQHAFEPVDRPYVVSGRALRSWTRV |
| | REEWLRHGDTQESRKNICNRLQDRLRGKFGDPDVFHWLAEDGQEALWKERDCVTSFSLLNDADGLLEKRKGY |
| | ALMTFADARLHPRWAMYEAPGGSNLRTYQIRKTENGLVVADWLLSPRNESAAVEEKTFNVRLAPSGQLSNVS |
| | FDQIQKGSKMVGRCRYQSANQQFEGLLGGAEILFDRKRIANEQHGATDLASKPGHVWFKLTLDVRPQAPQGW |
| | LDGKGRPALPPEAKHFKTALSNKSKFADQVRPGLRVLSVDLGVRSFAACSVFELVRGGPDQGTYFPAADGRT |
| | VDDPEKLWAKHERSFKITLPGENPSRKEEIARRAAMEELRSLNGDIRRLKAILRLSVLQEDDPRTEHLRLFM |
| | EAIVDDPAKSALNAELFKGFGDDRFRSTPDLWKQHCHFFHDKAEKVVAERFSRWRTETRPKSSSWQDWRERR |
| | GYAGGKSYWAVTYLEAVRGLILRWNMRGRTYGEVNRQDKKQFGTVASALLHHINQLKEDRIKTGADMIIQAA |
| | RGFVPRKNGAGWVQVHEPCRLILFEDLARYRFRTDRSRRENSRLMRWSHREIVNEVGMQGELYGLHVDTTEA |
| | GFSSRYLASSGAPGVRCRHLVEEDFHDGLPGMHLVGELDWLLPKDKDRTANEARRLLGGMVRPGMLVPWDGG |
| | ELFATLNAASQLHVIHADINAAQNLQRRFWGRCGEAIRIVCNQLSVDGSTRYEMAKAPKARLLGALQQLKNG |
| | DAPFHLTSIPNSQKPENSYVMTPTNAGKKYRAGPGEKSSGEEDELALDIVEQAEELAQGRKTFFRDPSGVFF |
| | APDRWLPSEIYWSRIRRRIWQVTLERNSSGRQERAEMDEMPY (SEQ ID NO: 60) |

[0219] The base editors described herein may also comprise Cas12a (Cpf1) (dCpf1) variants that may be used as a guide nucleotide sequence-programmable DNA-binding protein domain. The Cas12a (Cpf1) protein has a RuvC-like endonuclease domain that is similar to the RuvC domain of Cas9 but does not have a HNH endonuclease domain, and the N-terminal of Cas12a (Cpf1) does not have the alfa-helical recognition lobe of Cas9. It was shown in Zetsche et al., Cell, 163, 759-771, 2015 (which is incorporated herein by reference) that, the RuvC-like domain of Cas12a (Cpf1) is responsible for cleaving both DNA strands and inactivation of the RuvC-like domain inactivates Cas12a (Cpf1) nuclease activity.

(8) Cas9 Equivalents with Expanded PAM Sequence

[0220] In some embodiments, the napDNAbp is a nucleic acid programmable DNA binding protein that does not require a canonical (NGG) PAM sequence. In some embodiments, the napDNAbp is an argonaute protein. One example of such a nucleic acid programmable DNA binding protein is an Argonaute protein from Natronobacterium gregoryi (NgAgo). NgAgo is a ssDNA-guided endonuclease. NgAgo binds 5′ phosphorylated ssDNA of ˜24 nucleotides (gDNA) to guide it to its target site and will make DNA double-strand breaks at the gDNA site. In contrast to Cas9, the NgAgo-gDNA system does not require a protospacer-adjacent motif (PAM). Using a nuclease inactive NgAgo (dNgAgo) can greatly expand the bases that may be targeted. The characterization and use of NgAgo have been described in Gao et al., Nat Biotechnol., 2016 July; 34(7):768-73. PubMed PMID: 27136078; Swarts et al., Nature. 507(7491) (2014):258-61; and Swarts et al., Nucleic Acids Res. 43(10) (2015):5120-9, each of which is incorporated herein by reference.

[0221] In some embodiments, the napDNAbp is a prokaryotic homolog of an Argonaute protein. Prokaryotic homologs of Argonaute proteins are known and have been described, for example, in Makarova K., et al., “Prokaryotic homologs of Argonaute proteins are predicted to function as key components of a novel system of defense against mobile genetic elements”, Biol Direct. 2009 Aug. 25; 4:29. doi: 10.1186/1745-6150-4-29, the entire contents of which is hereby incorporated by reference. In some embodiments, the napDNAbp is a Marinitoga piezophila Argunaute (MpAgo) protein. The CRISPR-associated Marinitoga piezophila Argunaute (MpAgo) protein cleaves single-stranded target sequences using 5′-phosphorylated guides. The 5′ guides are used by all known Argonautes. The crystal structure of an MpAgo-RNA complex shows a guide strand binding site comprising residues that block 5′ phosphate interactions. This data suggests the evolution of an Argonaute subclass with noncanonical specificity for a 5′-hydroxylated guide. See, e.g., Kaya et al., “A bacterial Argonaute with noncanonical guide RNA specificity”, Proc Natl Acad Sci USA. 2016 Apr. 12; 113(15):4057-62, the entire contents of which are hereby incorporated by reference). It should be appreciated that other argonaute proteins may be used, and are within the scope of this disclosure.

[0222] In some embodiments, the napDNAbp is a single effector of a microbial CRISPR-Cas system. Single effectors of microbial CRISPR-Cas systems include, without limitation, Cas9, Cas12a (Cpf1), Cas12b1 (C2c1), Cas13a (C2c2), and Cas12c (C2c3). Typically, microbial CRISPR-Cas systems are divided into Class 1 and Class 2 systems. Class 1 systems have multi-subunit effector complexes, while Class 2 systems have a single protein effector. For example, Cas9 and Cas12a (Cpf1) are Class 2 effectors. In addition to Cas9 and Cas12a (Cpf1), three distinct Class 2 CRISPR-Cas systems (Cas12b1, Cas13a, and Cas12c) have been described by Shmakov et al., “Discovery and Functional Characterization of Diverse Class 2 CRISPR Cas Systems”, Mol. Cell, 2015 Nov. 5; 60(3): 385-397, the entire contents of which is hereby incorporated by reference.

[0223] Effectors of two of the systems, Cas12b1 and Cas12c, contain RuvC-like endonuclease domains related to Cas12a. A third system, Cas13a contains an effector with two predicted HEPN RNase domains. Production of mature CRISPR RNA is tracrRNA-independent, unlike production of CRISPR RNA by Cas12b1. Cas12b1 depends on both CRISPR RNA and tracrRNA for DNA cleavage. Bacterial Cas13a has been shown to possess a unique RNase activity for CRISPR RNA maturation distinct from its RNA-activated single-stranded RNA degradation activity. These RNase functions are different from each other and from the CRISPR RNA-processing behavior of Cas12a. See, e.g., East-Seletsky, et al., “Two distinct RNase activities of CRISPR-C2c2 enable guide-RNA processing and RNA detection”, Nature, 2016 Oct. 13; 538(7624):270-273, the entire contents of which are hereby incorporated by reference. In vitro biochemical analysis of Cas13a in Leptotrichia shahii has shown that Cas13a is guided by a single CRISPR RNA and can be programed to cleave ssRNA targets carrying complementary protospacers. Catalytic residues in the two conserved HEPN domains mediate cleavage. Mutations in the catalytic residues generate catalytically inactive RNA-binding proteins. See e.g., Abudayyeh et al., “C2c2 is a single-component programmable RNA-guided RNA-targeting CRISPR effector”, Science, 2016 Aug. 5; 353(6299), the entire contents of which are hereby incorporated by reference.

[0224] The crystal structure of Alicyclobaccillus acidoterrastris Cas12b1 (AacC2c1) has been reported in complex with a chimeric single-molecule guide RNA (sgRNA). See e.g., Liu et al., “C2c1-sgRNA Complex Structure Reveals RNA-Guided DNA Cleavage Mechanism”, Mol. Cell, 2017 Jan. 19; 65(2):310-322, the entire contents of which are hereby incorporated by reference. The crystal structure has also been reported in Alicyclobacillus acidoterrestris C2c1 bound to target DNAs as ternary complexes. See e.g., Yang et al., “PAM-dependent Target DNA Recognition and Cleavage by C2C1 CRISPR-Cas endonuclease”, Cell, 2016 Dec. 15; 167(7):1814-1828, the entire contents of which are hereby incorporated by reference. Catalytically competent conformations of AacC2c1, both with target and non-target DNA strands, have been captured independently positioned within a single RuvC catalytic pocket, with C2c1-mediated cleavage resulting in a staggered seven-nucleotide break of target DNA. Structural comparisons between C2c1 ternary complexes and previously identified Cas9 and Cpf1 counterparts demonstrate the diversity of mechanisms used by CRISPR-Cas9 systems.

[0225] In some embodiments, the napDNAbp may be a Cas12b1, a Cas13a, or a Cas12c protein. In some embodiments, the napDNAbp is a Cas12b1 protein. In some embodiments, the napDNAbp is a Cas13a protein. In some embodiments, the napDNAbp is a Cas12c protein. In some embodiments, the napDNAbp comprises an amino acid sequence that is at least 85%, at least 90%, at least 91%, at least 92%, at least 93%, at least 94%, at least 95%, at least 96%, at least 97%, at least 98%, at least 99%, or at least 99.5% identical to a naturally-occurring Cas12b1 (C2c1), Cas13a (C2c2), or Cas12c (C2c3) protein. In some embodiments, the napDNAbp is a naturally-occurring Cas12b1 (C2c1), Cas13a (C2c2), or Cas12c (C2c3) protein.

[0226] Some aspects of the disclosure provide Cas9 domains that have different PAM specificities. Typically, Cas9 proteins, such as Cas9 from S. pyogenes (spCas9), require a canonical NGG PAM sequence to bind a particular nucleic acid region. This may limit the ability to edit desired bases within a genome. In some embodiments, the base editing fusion proteins provided herein may need to be placed at a precise location, for example where a target base is placed within a 4 base region (e.g., a “editing window”), which is approximately 15 bases upstream of the PAM. See Komor, A. C., et al., “Programmable editing of a target base in genomic DNA without double-stranded DNA cleavage” Nature 533, 420-424 (2016), the entire contents of which are hereby incorporated by reference. Accordingly, in some embodiments, any of the fusion proteins provided herein may contain a Cas9 domain that is capable of binding a nucleotide sequence that does not contain a canonical (e.g., NGG) PAM sequence. Cas9 domains that bind to non-canonical PAM sequences have been described in the art and would be apparent to the skilled artisan. For example, Cas9 domains that bind non-canonical PAM sequences have been described in Kleinstiver, B. P., et al., “Engineered CRISPR-Cas9 nucleases with altered PAM specificities” Nature 523, 481-485 (2015); and Kleinstiver, B. P., et al., “Broadening the targeting range of Staphylococcus aureus CRISPR-Cas9 by modifying PAM recognition” Nature Biotechnology 33, 1293-1298 (2015); the entire contents of each are hereby incorporated by reference.

[0227] For example, a napDNAbp domain with altered PAM specificity, such as a domain with at least 80%, at least 85%, at least 90%, at least 95%, or at least 99% sequence identity with wild type Francisella novicida Cpf1 (SEQ ID NO: 61) (D917, E1006, and D1255), which has the following amino acid sequence:

(SEQ ID NO: 61)
MSIYQEFVNKYSLSKTLRFELIPQGKTLENIKARGLILDDEKRAKDYKKAKQIIDKYHQFFIEEILSSVCISEDLLQNYSD
VYFKLKKSDDDNLQKDFKSAKDTIKKQISEYIKDSEKFKNLFNQNLIDAKKGQESDLILWLKQSKDNGIELFKANSDITDI
DEALEIIKSFKGWTTYFKGFHENRKNVYSSNDIPTSIIYRIVDDNLPKFLENKAKYESLKDKAPEAINYEQIKKDLAEELT
FDIDYKTSEVNQRVFSLDEVFEIANFNNYLNQSGITKFNTIIGGKFVNGENTKRKGINEYINLYSQQINDKTLKKYKMSVL
FKQILSDTESKSFVIDKLEDDSDVVTTMQSFYEQIAAFKTVEEKSIKETLSLLFDDLKAQKLDLSKIYFKNDKSLTDLSQQ
VFDDYSVIGTAVLEYITQQIAPKNLDNPSKKEQELIAKKTEKAKYLSLETIKLALEEFNKHRDIDKQCRFEEILANFAAIP
MIFDEIAQNKDNLAQISIKYQNQGKKDLLQASAEDDVKAIKDLLDQTNNLLHKLKIFHISQSEDKANILDKDEHFYLVFEE
CYFELANIVPLYNKIRNYITQKPYSDEKFKLNFENSTLANGWDKNKEPDNTAILFIKDDKYYLGVMNKKNNKIFDDKAIKE
NKGEGYKKIVYKLLPGANKMLPKVFFSAKSIKFYNPSEDILRIRNHSTHTKNGSPQKGYEKFEFNIEDCRKFIDFYKQSIS
KHPEWKDFGFRFSDTQRYNSIDEFYREVENQGYKLTFENISESYIDSVVNQGKLYLFQIYNKDFSAYSKGRPNLHTLYWKA
LFDERNLQDVVYKLNGEAELFYRKQSIPKKITHPAKEAIANKNKDNPKKESVFEYDLIKDKRFTEDKFFFHCPITINFKSS
GANKFNDEINLLLKEKANDVHILSIDRGERHLAYYTLVDGKGNIIKQDTFNIIGNDRMKTNYHDKLAAIEKDRDSARKDWK
KINNIKEMKEGYLSQVVHEIAKLVIEYNAIVVFEDLNFGFKRGRFKVEKQVYQKLEKMLIEKLNYLVFKDNEFDKTGGVLR
AYQLTAPFETFKKMGKQTGIIYYVPAGFTSKICPVTGFVNQLYPKYESVSKSQEFFSKFDKICYNLDKGYFEFSFDYKNFG
DKAAKGKWTIASFGSRLINFRNSDKNHNWDTREVYPTKELEKLLKDYSIEYGHGECIKAAICGESDKKFFAKLTSVLNTIL
QMRNSKTGTELDYLISPVADVNGNFFDSRQAPKNMPQDADANGAYHIGLKGLMLLGRIKNNQEGKKLNLVIKNEEYFEFVQ
NRNN

[0228] An additional napDNAbp domain with altered PAM specificity, such as a domain having at least 80%, at least 85%, at least 90%, at least 95%, or at least 99% sequence identity with wild type Geobacillus thermodenitrificans Cas9 (SEQ ID NO: 62), which has the following amino acid sequence:

(SEQ ID NO: 62)
MKYKIGLDIGITSIGWAVINLDIPRIEDLGVRIFDRAENPKTGESLALPRRLARSARRRLRRRKHRLERIRRLFVREGILT
KEELNKLFEKKHEIDVWQLRVEALDRKLNNDELARILLHLAKRRGFRSNRKSERTNKENSTMLKHIEENQSILSSYRTVAE
MVVKDPKFSLHKRNKEDNYTNTVARDDLEREIKLIFAKQREYGNIVCTEAFEHEYISIWASQRPFASKDDIEKKVGFCTFE
PKEKRAPKATYTFQSFTVWEHINKLRLVSPGGIRALTDDERRLIYKQAFHKNKITFHDVRTLLNLPDDTRFKGLLYDRNTT
LKENEKVRFLELGAYHKIRKAIDSVYGKGAAKSFRPIDFDTFGYALTMFKDDTDIRSYLRNEYEQNGKRMENLADKVYDEE
LIEELLNLSFSKFGHLSLKALRNILPYMEQGEVYSTACERAGYTFTGPKKKQKTVLLPNIPPIANPVVMRALTQARKVVNA
IIKKYGSPVSIHIELARELSQSFDERRKMQKEQEGNRKKNETAIRQLVEYGLTLNPTGLDIVKFKLWSEQNGKCAYSLQPI
EIERLLEPGYTEVDHVIPYSRSLDDSYTNKVLVLTKENREKGNRTPAEYLGLGSERWQQFETFVLTNKQFSKKKRDRLLRL
HYDENEENEFKNRNLNDTRYISRFLANFIREHLKFADSDDKQKVYTVNGRITAHLRSRWNFNKNREESNLHHAVDAAIVAC
TTPSDIARVTAFYQRREQNKELSKKTDPQFPQPWPHFADELQARLSKNPKESIKALNLGNYDNEKLESLQPVFVSRMPKRS
ITGAAHQETLRRYIGIDERSGKIQTVVKKKLSEIQLDKTGHFPMYGKESDPRTYEAIRQRLLEHNNDPKKAFQEPLYKPKK
NGELGPIIRTIKIIDTTNQVIPLNDGKTVAYNSNIVRVDVFEKDGKYYCVPIYTIDMMKGILPNKAIEPNKPYSEWKEMTE
DYTFRFSLYPNDLIRIEFPREKTIKTAVGEEIKIKDLFAYYQTIDSSNGGLSLVSHDNNFSLRSIGSRTLKRFEKYQVDVL
GNIYKVRGEKRVGVASSSHSKAGETIRPL

[0229] In some embodiments, the nucleic acid programmable DNA binding protein (napDNAbp) is a nucleic acid programmable DNA binding protein that does not require a canonical (NGG) PAM sequence. In some embodiments, the napDNAbp is an argonaute protein. One example of such a nucleic acid programmable DNA binding protein is an Argonaute protein from Natronobacterium gregoryi (NgAgo). NgAgo is a ssDNA-guided endonuclease. NgAgo binds 5′ phosphorylated ssDNA of ˜24 nucleotides (gDNA) to guide it to its target site and will make DNA double-strand breaks at the gDNA site. In contrast to Cas9, the NgAgo-gDNA system does not require a protospacer-adjacent motif (PAM). Using a nuclease inactive NgAgo (dNgAgo) can greatly expand the bases that may be targeted. The characterization and use of NgAgo have been described in Gao et al., Nat Biotechnol., 34(7): 768-73 (2016), PubMed PMID: 27136078; Swarts et al., Nature, 507(7491): 258-61 (2014); and Swarts et al., Nucleic Acids Res. 43(10) (2015): 5120-9, each of which is incorporated herein by reference. The sequence of Natronobacterium gregoryi Argonaute is provided in SEQ ID NO: 63.

[0230] The disclosed fusion proteins may comprise a napDNAbp domain having at least 80%, at least 85%, at least 90%, at least 95%, or at least 99% sequence identity with wild type Natronobacterium gregoryi Argonaute (SEQ ID NO: 63), which has the following amino acid sequence:

(SEQ ID NO: 63)
MTVIDLDSTTTADELTSGHTYDISVTLTGVYDNTDEQHPRMSLAFEQDNGERRYITLWKNTTPKDVFTYDYATGSTYIFTN
IDYEVKDGYENLTATYQTTVENATAQEVGTTDEDETFAGGEPLDHHLDDALNETPDDAETESDSGHVMTSFASRDQLPEWT
LHTYTLTATDGAKTDTEYARRTLAYTVRQELYTDHDAAPVATDGLMLLTPEPLGETPLDLDCGVRVEADETRTLDYTTAKD
RLLARELVEEGLKRSLWDDYLVRGIDEVLSKEPVLTCDEFDLHERYDLSVEVGHSGRAYLHINFRHRFVPKLTLADIDDDN
IYPGLRVKTTYRPRRGHIVWGLRDECATDSLNTLGNQSVVAYHRNNQTPINTDLLDAIEAADRRVVETRRQGHGDDAVSFP
QELLAVEPNTHQIKQFASDGFHQQARSKTRLSASRCSEKAQAFAERLDPVRLNGSTVEFSSEFFTGNNEQQLRLLYENGES
VLTFRDGARGAHPDETFSKGIVNPPESFEVAVVLPEQQADTCKAQWDTMADLLNQAGAPPTRSETVQYDAFSSPESISLNV
AGAIDPSEVDAAFVVLPPDQEGFADLASPTETYDELKKALANMGIYSQMAYFDRFRDAKIFYTRNVALGLLAAAGGVAFTT
EHAMPGDADMFIGIDVSRSYPEDGASGQINIAATATAVYKDGTILGHSSTRPQLGEKLQSTDVRDIMKNAILGYQQVTGES
PTHIVIHRDGFMNEDLDPATEFLNEQGVEYDIVEIRKQPQTRLLAVSDVQYDTPVKSIAAINQNEPRATVATFGAPEYLAT
RDGGGLPRPIQIERVAGETDIETLTRQVYLLSQSHIQVHNSTARLPITTAYADQASTHATKGYLVQTGAFESNVGFL

### (9) Cas9 Circular Permutants

[0231] In various embodiments, the base editors disclosed herein may comprise a circular permutant of Cas9.

[0232] The term “circularly permuted Cas9” or “circular permutant” of Cas9 or “CP-Cas9”) refers to any Cas9 protein, or variant thereof, that occurs or has been modify to engineered as a circular permutant variant, which means the N-terminus and the C-terminus of a Cas9 protein (e.g., a wild type Cas9 protein) have been topically rearranged. Such circularly permuted Cas9 proteins, or variants thereof, retain the ability to bind DNA when complexed with a guide RNA (gRNA). See, Oakes et al., “Protein Engineering of Cas9 for enhanced function,” Methods Enzymol, 2014, 546: 491-511 and Oakes et al., “CRISPR-Cas9 Circular Permutants as Programmable Scaffolds for Genome Modification,” Cell, Jan. 10, 2019, 176: 254-267, each of are incorporated herein by reference. The instant disclosure contemplates any previously known CP-Cas9 or use a new CP-Cas9 so long as the resulting circularly permuted protein retains the ability to bind DNA when complexed with a guide RNA (gRNA).

[0233] Any of the Cas9 proteins described herein, including any variant, ortholog, or naturally occurring Cas9 or equivalent thereof, may be reconfigured as a circular permutant variant.

[0234] In various embodiments, the circular permutants of Cas9 may have the following structure: N-terminus-[original C-terminus]-[optional linker]-[original N-terminus]-C-terminus.

[0235] As an example, the present disclosure contemplates the following circular permutants of canonical S. pyogenes Cas9 (1368 amino acids of UniProtKB—Q99ZW2 (CAS9_STRP1) (numbering is based on the amino acid position in SEQ ID NO: 5)): N-terminus-[1268-1368]-[optional linker]-[1-1267]-C-terminus; N-terminus-[1168-1368]-[optional linker]-[1-1167]-C-terminus; N-terminus-[1068-1368]-[optional linker]-[1-1067]-C-terminus; N-terminus-[968-1368]-[optional linker]-[1-967]-C-terminus; N-terminus-[868-1368]-[optional linker]-[1-867]-C-terminus; N-terminus-[768-1368]-[optional linker]-[1-767]-C-terminus; N-terminus-[668-1368]-[optional linker]-[1-667]-C-terminus; N-terminus-[568-1368]-[optional linker]-[1-567]-C-terminus; N-terminus-[468-1368]-[optional linker]-[1-467]-C-terminus; N-terminus-[368-1368]-[optional linker]-[1-367]-C-terminus; N-terminus-[268-1368]-[optional linker]-[1-267]-C-terminus; N-terminus-[168-1368]-[optional linker]-[1-167]-C-terminus; N-terminus-[68-1368]-[optional linker]-[1-67]-C-terminus; or N-terminus-[10-1368]-[optional linker]-[1-9]-C-terminus, or the corresponding circular permutants of other Cas9 proteins (including other Cas9 orthologs, variants, etc).

[0236] In particular embodiments, the circular permutant Cas9 has the following structure (based on S. pyogenes Cas9 (1368 amino acids of UniProtKB—Q99ZW2 (CAS9_STRP1) (numbering is based on the amino acid position in SEQ ID NO: 5): N-terminus-[102-1368]-[optional linker]-[1-101]-C-terminus; N-terminus-[1028-1368]-[optional linker]-[1-1027]-C-terminus; N-terminus-[1041-1368]-[optional linker]-[1-1043]-C-terminus; N-terminus-[1249-1368]-[optional linker]-[1-1248]-C-terminus; or N-terminus-[1300-1368]-[optional linker]-[1-1299]-C-terminus, or the corresponding circular permutants of other Cas9 proteins (including other Cas9 orthologs, variants, etc).

[0237] In still other embodiments, the circular permutant Cas9 has the following structure (based on S. pyogenes Cas9 (1368 amino acids of UniProtKB—Q99ZW2 (CAS9_STRP1) (numbering is based on the amino acid position in SEQ ID NO: 5): N-terminus-[103-1368]-[optional linker]-[1-102]-C-terminus; N-terminus-[1029-1368]-[optional linker]-[1-1028]-C-terminus; N-terminus-[1042-1368]-[optional linker]-[1-1041]-C-terminus; N-terminus-[1250-1368]-[optional linker]-[1-1249]-C-terminus; or N-terminus-[1301-1368]-[optional linker]-[1-1300]-C-terminus, or the corresponding circular permutants of other Cas9 proteins (including other Cas9 orthologs, variants, etc).

[0238] In some embodiments, the circular permutant can be formed by linking a C-terminal fragment of a Cas9 to an N-terminal fragment of a Cas9, either directly or by using a linker, such as an amino acid linker. In some embodiments, The C-terminal fragment may correspond to the C-terminal 95% or more of the amino acids of a Cas9 (e.g., amino acids about 1300-1368), or the C-terminal 90%, 85%, 80%, 75%, 70%, 65%, 60%, 55%, 50%, 45%, 40%, 35%, 30%, 25%, 20%, 15%, 10%, or 5% or more of a Cas9 (e.g., any one of SEQ ID NOs: 5, 8, 10, 12-26). The N-terminal portion may correspond to the N-terminal 95% or more of the amino acids of a Cas9 (e.g., amino acids about 1-1300), or the N-terminal 90%, 85%, 80%, 75%, 70%, 65%, 60%, 55%, 50%, 45%, 40%, 35%, 30%, 25%, 20%, 15%, 10%, or 5% or more of a Cas9 (e.g., of SEQ ID NO: 5, 8, 10, 12-26).

[0239] In some embodiments, the circular permutant can be formed by linking a C-terminal fragment of a Cas9 to an N-terminal fragment of a Cas9, either directly or by using a linker, such as an amino acid linker. In some embodiments, the C-terminal fragment that is rearranged to the N-terminus, includes or corresponds to the C-terminal 30% or less of the amino acids of a Cas9 (e.g., amino acids 1012-1368 of SEQ ID NO: 5). In some embodiments, the C-terminal fragment that is rearranged to the N-terminus, includes or corresponds to the C-terminal 30%, 29%, 28%, 27%, 26%, 25%, 24%, 23%, 22%, 21%, 20%, 19%, 18%, 17%, 16%, 15%, 14%, 13%, 12%, 11%, 10%, 9%, 8%, 7%, 6%, 5%, 4%, 3%, 2%, or 1% of the amino acids of a Cas9 (e.g., the Cas9 of SEQ ID NO: 5). In some embodiments, the C-terminal fragment that is rearranged to the N-terminus, includes or corresponds to the C-terminal 410 residues or less of a Cas9 (e.g., the Cas9 of SEQ ID NO: 5). In some embodiments, the C-terminal portion that is rearranged to the N-terminus, includes or corresponds to the C-terminal 410, 400, 390, 380, 370, 360, 350, 340, 330, 320, 310, 300, 290, 280, 270, 260, 250, 240, 230, 220, 210, 200, 190, 180, 170, 160, 150, 140, 130, 120, 110, 100, 90, 80, 70, 60, 50, 40, 30, 20, or 10 residues of a Cas9 (e.g., the Cas9 of SEQ ID NO: 5). In some embodiments, the C-terminal portion that is rearranged to the N-terminus, includes or corresponds to the C-terminal 357, 341, 328, 120, or 69 residues of a Cas9 (e.g., the Cas9 of SEQ ID NO: 5).

[0240] In other embodiments, circular permutant Cas9 variants may be defined as a topological rearrangement of a Cas9 primary structure based on the following method, which is based on S. pyogenes Cas9 of SEQ ID NO: 5: (a) selecting a circular permutant (CP) site corresponding to an internal amino acid residue of the Cas9 primary structure, which dissects the original protein into two halves: an N-terminal region and a C-terminal region; (b) modifying the Cas9 protein sequence (e.g., by genetic engineering techniques) by moving the original C-terminal region (comprising the CP site amino acid) to precede the original N-terminal region, thereby forming a new N-terminus of the Cas9 protein that now begins with the CP site amino acid residue. The CP site can be located in any domain of the Cas9 protein, including, for example, the helical-II domain, the RuvCIII domain, or the CTD domain. For example, the CP site may be located (relative the S. pyogenes Cas9 of SEQ ID NO: 5) at original amino acid residue 181, 199, 230, 270, 310, 1010, 1016, 1023, 1029, 1041, 1247, 1249, or 1282. Thus, once relocated to the N-terminus, original amino acid 181, 199, 230, 270, 310, 1010, 1016, 1023, 1029, 1041, 1247, 1249, or 1282 would become the new N-terminal amino acid. Nomenclature of these CP-Cas9 proteins may be referred to as Cas9-CP¹⁸¹, Cas9-CP¹⁹⁹, Cas9-CP²³⁰, Cas9-CP²⁷⁰, Cas9-CP³¹⁰, Cas9-CP¹⁰¹⁰, Cas9-CP¹⁰¹⁶, Cas9-CP¹⁰²³, Cas9-CP¹⁰²⁹, Cas9-CP¹⁰⁴¹, Cas9-CP¹²⁴⁷, Cas9-CP¹²⁴⁹, and Cas9-CP¹²⁸², respectively. This description is not meant to be limited to making CP variants from SEQ ID NO: 5, but may be implemented to make CP variants in any Cas9 sequence, either at CP sites that correspond to these positions, or at other CP sites entirely. This description is not meant to limit the specific CP sites in any way. Virtually any CP site may be used to form a CP-Cas9 variant.

[0241] Exemplary CP-Cas9 amino acid sequences, based on the Cas9 of SEQ ID NO: 5, are provided below in which linker sequences are indicated by underlining and optional methionine (M) residues are indicated in bold. It should be appreciated that the disclosure provides CP-Cas9 sequences that do not include a linker sequence or that include different linker sequences. It should be appreciated that CP-Cas9 sequences may be based on Cas9 sequences other than that of SEQ ID NO: 5 and any examples provided herein are not meant to be limiting. Exemplary CP-Cas9 sequences are as follows:

| CP name | Sequence | SEQ ID NO: |
|---|---|---|
| CP1012 | DYKVYDVRKMIAKSEQEIGKATAKYFFYSNIMNFFKTEITLANGEIRKRPLIETN | SEQ ID NO: 64 |
| | GETGEIVWDKGRDFATVRKVLSMPQVNIVKKTEVQTGGFSKESILPKRNSDKLIA | |
| | RKKDWDPKKYGGFDSPTVAYSVLVVAKVEKGKSKKLKSVKELLGITIMERSSFEK | |
| | NPIDFLEAKGYKEVKKDLIIKLPKYSLFELENGRKRMLASAGELQKGNELALPSK | |
| | YVNFLYLASHYEKLKGSPEDNEQKQLFVEQHKHYLDEIIEQISEFSKRVILADAN | |
| | LDKVLSAYNKHRDKPIREQAENIIHLFTLTNLGAPAAFKYFDTTIDRKRYTSTKE | |
| | VLDATLIHQSITGLYETRIDLSQLGGDGGSGGSGGSGGSGGSGGSGGDKKYSIGL | |
| | AIGTNSVGWAVITDEYKVPSKKFKVLGNTDRHSIKKNLIGALLFDSGETAEATRL | |
| | KRTARRRYTRRKNRICYLQEIFSNEMAKVDDSFFHRLEESFLVEEDKKHERHPIF | |
| | GNIVDEVAYHEKYPTIYHLRKKLVDSTDKADLRLIYLALAHMIKFRGHFLIEGDL | |
| | NPDNSDVDKLFIQLVQTYNQLFEENPINASGVDAKAILSARLSKSRRLENLIAQL | |
| | PGEKKNGLFGNLIALSLGLTPNFKSNFDLAEDAKLQLSKDTYDDDLDNLLAQIGD | |
| | QYADLFLAAKNLSDAILLSDILRVNTEITKAPLSASMIKRYDEHHQDLTLLKALV | |
| | RQQLPEKYKEIFFDQSKNGYAGYIDGGASQEEFYKFIKPILEKMDGTEELLVKLN | |
| | REDLLRKQRTFDNGSIPHQIHLGELHAILRRQEDFYPFLKDNREKIEKILTFRIP | |
| | YYVGPLARGNSRFAWMTRKSEETITPWNFEEVVDKGASAQSFIERMTNFDKNLPN | |
| | EKVLPKHSLLYEYFTVYNELTKVKYVTEGMRKPAFLSGEQKKAIVDLLFKTNRKV | |
| | TVKQLKEDYFKKIECFDSVEISGVEDRFNASLGTYHDLLKIIKDKDFLDNEENED | |
| | ILEDIVLTLTLFEDREMIEERLKTYAHLFDDKVMKQLKRRRYTGWGRLSRKLING | |
| | IRDKQSGKTILDFLKSDGFANRNFMQLIHDDSLTFKEDIQKAQVSGQGDSLHEHI | |
| | ANLAGSPAIKKGILQTVKVVDELVKVMGRHKPENIVIEMARENQTTQKGQKNSRE | |
| | RMKRIEEGIKELGSQILKEHPVENTQLQNEKLYLYYLQNGRDMYVDQELDINRLS | |
| | DYDVDHIVPQSFLKDDSIDNKVLTRSDKNRGKSDNVPSEEVVKKMKNYWRQLLNA | |
| | KLITQRKFDNLTKAERGGLSELDKAGFIKRQLVETRQITKHVAQILDSRMNTKYD | |
| | ENDKLIREVKVITLKSKLVSDFRKDFQFYKVREINNYHHAHDAYLNAVVGTALIK | |
| | KYPKLESEFVYG | |
| CP1028 | EIGKATAKYFFYSNIMNFFKTEITLANGEIRKRPLIETNGETGEIVWDKGRDFAT | SEQ ID NO: 65 |
| | VRKVLSMPQVNIVKKTEVQTGGFSKESILPKRNSDKLIARKKDWDPKKYGGFDSP | |
| | TVAYSVLVVAKVEKGKSKKLKSVKELLGITIMERSSFEKNPIDFLEAKGYKEVKK | |
| | DLIIKLPKYSLFELENGRKRMLASAGELQKGNELALPSKYVNFLYLASHYEKLKG | |
| | SPEDNEQKQLFVEQHKHYLDEIIEQISEFSKRVILADANLDKVLSAYNKHRDKPI | |
| | REQAENIIHLFTLTNLGAPAAFKYFDTTIDRKRYTSTKEVLDATLIHQSITGLYE | |
| | TRIDLSQLGGDGGSGGSGGSGGSGGSGGSGGMDKKYSIGLAIGTNSVGWAVITDE | |
| | YKVPSKKFKVLGNTDRHSIKKNLIGALLFDSGETAEATRLKRTARRRYTRRKNRI | |
| | CYLQEIFSNEMAKVDDSFFHRLEESFLVEEDKKHERHPIFGNIVDEVAYHEKYPT | |
| | IYHLRKKLVDSTDKADLRLIYLALAHMIKFRGHFLIEGDLNPDNSDVDKLFIQLV | |
| | QTYNQLFEENPINASGVDAKAILSARLSKSRRLENLIAQLPGEKKNGLFGNLIAL | |
| | SLGLTPNFKSNFDLAEDAKLQLSKDTYDDDLDNLLAQIGDQYADLFLAAKNLSDA | |
| | ILLSDILRVNTEITKAPLSASMIKRYDEHHQDLTLLKALVRQQLPEKYKEIFFDQ | |
| | SKNGYAGYIDGGASQEEFYKFIKPILEKMDGTEELLVKLNREDLLRKQRTFDNGS | |
| | IPHQIHLGELHAILRRQEDFYPFLKDNREKIEKILTFRIPYYVGPLARGNSRFAW | |
| | MTRKSEETITPWNFEEVVDKGASAQSFIERMTNFDKNLPNEKVLPKHSLLYEYFT | |
| | VYNELTKVKYVTEGMRKPAFLSGEQKKAIVDLLFKTNRKVTVKQLKEDYFKKIEC | |
| | FDSVEISGVEDRFNASLGTYHDLLKIIKDKDFLDNEENEDILEDIVLTLTLFEDR | |
| | EMIEERLKTYAHLFDDKVMKQLKRRRYTGWGRLSRKLINGIRDKQSGKTILDFLK | |
| | SDGFANRNFMQLIHDDSLTFKEDIQKAQVSGQGDSLHEHIANLAGSPAIKKGILQ | |
| | TVKVVDELVKVMGRHKPENIVIEMARENQTTQKGQKNSRERMKRIEEGIKELGSQ | |
| | ILKEHPVENTQLQNEKLYLYYLQNGRDMYVDQELDINRLSDYDVDHIVPQSFLKD | |
| | DSIDNKVLTRSDKNRGKSDNVPSEEVVKKMKNYWRQLLNAKLITQRKFDNLTKAE | |
| | RGGLSELDKAGFIKRQLVETRQITKHVAQILDSRMNTKYDENDKLIREVKVITLK | |
| | SKLVSDFRKDFQFYKVREINNYHHAHDAYLNAVVGTALIKKYPKLESEFVYGDYK | |
| | VYDVRKMIAKSEQ | |
| CP1041 | NIMNFFKTEITLANGEIRKRPLIETNGETGEIVWDKGRDFATVRKVLSMPQVNIV | SEQ ID NO: 66 |
| | KKTEVQTGGFSKESILPKRNSDKLIARKKDWDPKKYGGFDSPTVAYSVLVVAKVE | |
| | KGKSKKLKSVKELLGITIMERSSFEKNPIDFLEAKGYKEVKKDLIIKLPKYSLFE | |
| | LENGRKRMLASAGELQKGNELALPSKYVNFLYLASHYEKLKGSPEDNEQKQLFVE | |
| | QHKHYLDEIIEQISEFSKRVILADANLDKVLSAYNKHRDKPIREQAENIIHLFTL | |
| | TNLGAPAAFKYFDTTIDRKRYTSTKEVLDATLIHQSITGLYETRIDLSQLGGDGG | |
| | SGGSGGSGGSGGSGGSGGDKKYSIGLAIGTNSVGWAVITDEYKVPSKKFKVLGNT | |
| | DRHSIKKNLIGALLFDSGETAEATRLKRTARRRYTRRKNRICYLQEIFSNEMAKV | |
| | DDSFFHRLEESFLVEEDKKHERHPIFGNIVDEVAYHEKYPTIYHLRKKLVDSTDK | |
| | ADLRLIYLALAHMIKFRGHFLIEGDLNPDNSDVDKLFIQLVQTYNQLFEENPINA | |
| | SGVDAKAILSARLSKSRRLENLIAQLPGEKKNGLFGNLIALSLGLTPNFKSNFDL | |
| | AEDAKLQLSKDTYDDDLDNLLAQIGDQYADLFLAAKNLSDAILLSDILRVNTEIT | |
| | KAPLSASMIKRYDEHHQDLTLLKALVRQQLPEKYKEIFFDQSKNGYAGYIDGGAS | |
| | QEEFYKFIKPILEKMDGTEELLVKLNREDLLRKQRTFDNGSIPHQIHLGELHAIL | |
| | RRQEDFYPFLKDNREKIEKILTFRIPYYVGPLARGNSRFAWMTRKSEETITPWNF | |
| | EEVVDKGASAQSFIERMTNFDKNLPNEKVLPKHSLLYEYFTVYNELTKVKYVTEG | |
| | MRKPAFLSGEQKKAIVDLLFKTNRKVTVKQLKEDYFKKIECFDSVEISGVEDRFN | |
| | ASLGTYHDLLKIIKDKDFLDNEENEDILEDIVLTLTLFEDREMIEERLKTYAHLF | |
| | DDKVMKQLKRRRYTGWGRLSRKLINGIRDKQSGKTILDFLKSDGFANRNFMQLIH | |
| | DDSLTFKEDIQKAQVSGQGDSLHEHIANLAGSPAIKKGILQTVKVVDELVKVMGR | |
| | HKPENIVIEMARENQTTQKGQKNSRERMKRIEEGIKELGSQILKEHPVENTQLQN | |
| | EKLYLYYLQNGRDMYVDQELDINRLSDYDVDHIVPQSFLKDDSIDNKVLTRSDKN | |
| | RGKSDNVPSEEVVKKMKNYWRQLLNAKLITQRKFDNLTKAERGGLSELDKAGFIK | |
| | RQLVETRQITKHVAQILDSRMNTKYDENDKLIREVKVITLKSKLVSDFRKDFQFY | |
| | KVREINNYHHAHDAYLNAVVGTALIKKYPKLESEFVYGDYKVYDVRKMIAKSEQE | |
| | IGKATAKYFFYS | |
| CP1249 | PEDNEQKQLFVEQHKHYLDEIIEQISEFSKRVILADANLDKVLSAYNKHRDKPIR | SEQ ID NO: 67 |
| | EQAENIIHLFTLTNLGAPAAFKYFDTTIDRKRYTSTKEVLDATLIHQSITGLYET | |
| | RIDLSQLGGDGGSGGSGGSGGSGGSGGSGGMDKKYSIGLAIGTNSVGWAVITDEY | |
| | KVPSKKFKVLGNTDRHSIKKNLIGALLFDSGETAEATRLKRTARRRYTRRKNRIC | |
| | YLQEIFSNEMAKVDDSFFHRLEESFLVEEDKKHERHPIFGNIVDEVAYHEKYPTI | |
| | YHLRKKLVDSTDKADLRLIYLALAHMIKFRGHFLIEGDLNPDNSDVDKLFIQLVQ | |
| | TYNQLFEENPINASGVDAKAILSARLSKSRRLENLIAQLPGEKKNGLFGNLIALS | |
| | LGLTPNFKSNFDLAEDAKLQLSKDTYDDDLDNLLAQIGDQYADLFLAAKNLSDAI | |
| | LLSDILRVNTEITKAPLSASMIKRYDEHHQDLTLLKALVRQQLPEKYKEIFFDQS | |
| | KNGYAGYIDGGASQEEFYKFIKPILEKMDGTEELLVKLNREDLLRKQRTFDNGSI | |
| | PHQIHLGELHAILRRQEDFYPFLKDNREKIEKILTFRIPYYVGPLARGNSRFAWM | |
| | TRKSEETITPWNFEEVVDKGASAQSFIERMTNFDKNLPNEKVLPKHSLLYEYFTV | |
| | YNELTKVKYVTEGMRKPAFLSGEQKKAIVDLLFKTNRKVTVKQLKEDYFKKIECF | |
| | DSVEISGVEDRFNASLGTYHDLLKIIKDKDFLDNEENEDILEDIVLTLTLFEDRE | |
| | MIEERLKTYAHLFDDKVMKQLKRRRYTGWGRLSRKLINGIRDKQSGKTILDFLKS | |
| | DGFANRNFMQLIHDDSLTFKEDIQKAQVSGQGDSLHEHIANLAGSPAIKKGILQT | |
| | VKVVDELVKVMGRHKPENIVIEMARENQTTQKGQKNSRERMKRIEEGIKELGSQI | |
| | LKEHPVENTQLQNEKLYLYYLQNGRDMYVDQELDINRLSDYDVDHIVPQSFLKDD | |
| | SIDNKVLTRSDKNRGKSDNVPSEEVVKKMKNYWRQLLNAKLITQRKFDNLTKAER | |
| | GGLSELDKAGFIKRQLVETRQITKHVAQILDSRMNTKYDENDKLIREVKVITLKS | |
| | KLVSDFRKDFQFYKVREINNYHHAHDAYLNAVVGTALIKKYPKLESEFVYGDYKV | |
| | YDVRKMIAKSEQEIGKATAKYFFYSNIMNFFKTEITLANGEIRKRPLIETNGETG | |
| | EIVWDKGRDFATVRKVLSMPQVNIVKKTEVQTGGFSKESILPKRNSDKLIARKKD | |
| | WDPKKYGGFDSPTVAYSVLVVAKVEKGKSKKLKSVKELLGITIMERSSFEKNPID | |
| | FLEAKGYKEVKKDLIIKLPKYSLFELENGRKRMLASAGELQKGNELALPSKYVNF | |
| | LYLASHYEKLKGS | |
| CP1300 | KPIREQAENIIHLFTLTNLGAPAAFKYFDTTIDRKRYTSTKEVLDATLIHQSITG | SEQ ID NO: 68 |
| | LYETRIDLSQLGGDGGSGGSGGSGGSGGSGGSGGDKKYSIGLAIGTNSVGWAVIT | |
| | DEYKVPSKKFKVLGNTDRHSIKKNLIGALLFDSGETAEATRLKRTARRRYTRRKN | |
| | RICYLQEIFSNEMAKVDDSFFHRLEESFLVEEDKKHERHPIFGNIVDEVAYHEKY | |
| | PTIYHLRKKLVDSTDKADLRLIYLALAHMIKFRGHFLIEGDLNPDNSDVDKLFIQ | |
| | LVQTYNQLFEENPINASGVDAKAILSARLSKSRRLENLIAQLPGEKKNGLFGNLI | |
| | ALSLGLTPNFKSNFDLAEDAKLQLSKDTYDDDLDNLLAQIGDQYADLFLAAKNLS | |
| | DAILLSDILRVNTEITKAPLSASMIKRYDEHHQDLTLLKALVRQQLPEKYKEIFF | |
| | DQSKNGYAGYIDGGASQEEFYKFIKPILEKMDGTEELLVKLNREDLLRKQRTFDN | |
| | GSIPHQIHLGELHAILRRQEDFYPFLKDNREKIEKILTFRIPYYVGPLARGNSRF | |
| | AWMTRKSEETITPWNFEEVVDKGASAQSFIERMTNFDKNLPNEKVLPKHSLLYEY | |
| | FTVYNELTKVKYVTEGMRKPAFLSGEQKKAIVDLLFKTNRKVTVKQLKEDYFKKI | |
| | ECFDSVEISGVEDRFNASLGTYHDLLKIIKDKDFLDNEENEDILEDIVLTLTLFE | |
| | DREMIEERLKTYAHLFDDKVMKQLKRRRYTGWGRLSRKLINGIRDKQSGKTILDF | |
| | LKSDGFANRNFMQLIHDDSLTFKEDIQKAQVSGQGDSLHEHIANLAGSPAIKKGI | |
| | LQTVKVVDELVKVMGRHKPENIVIEMARENQTTQKGQKNSRERMKRIEEGIKELG | |
| | SQILKEHPVENTQLQNEKLYLYYLQNGRDMYVDQELDINRLSDYDVDHIVPQSFL | |
| | KDDSIDNKVLTRSDKNRGKSDNVPSEEVVKKMKNYWRQLLNAKLITQRKFDNLTK | |
| | AERGGLSELDKAGFIKRQLVETRQITKHVAQILDSRMNTKYDENDKLIREVKVIT | |
| | LKSKLVSDFRKDFQFYKVREINNYHHAHDAYLNAVVGTALIKKYPKLESEFVYGD | |
| | YKVYDVRKMIAKSEQEIGKATAKYFFYSNIMNFFKTEITLANGEIRKRPLIETNG | |
| | ETGEIVWDKGRDFATVRKVLSMPQVNIVKKTEVQTGGFSKESILPKRNSDKLIAR | |
| | KKDWDPKKYGGFDSPTVAYSVLVVAKVEKGKSKKLKSVKELLGITIMERSSFEKN | |
| | PIDFLEAKGYKEVKKDLIIKLPKYSLFELENGRKRMLASAGELQKGNELALPSKY | |
| | VNFLYLASHYEKLKGSPEDNEQKQLFVEQHKHYLDEIIEQISEFSKRVILADANL | |
| | DKVLSAYNKHRD | |

[0242] The Cas9 circular permutants that may be useful in the base editing constructs described herein. Exemplary C-terminal fragments of Cas9, based on the Cas9 of SEQ ID NO: 5, which may be rearranged to an N-terminus of Cas9, are provided below. It should be appreciated that such C-terminal fragments of Cas9 are exemplary and are not meant to be limiting. These exemplary CP-Cas9 fragments have the following sequences:

| CP name | Sequence | SEQ ID NO: |
|---|---|---|
| CP1012 C- | DYKVYDVRKMIAKSEQEIGKATAKYFFYSNIMNFFKTEITLANGEIRKRPLIETN | 69 |
| terminal | GETGEIVWDKGRDFATVRKVLSMPQVNIVKKTEVQTGGFSKESILPKRNSDKLIA | |
| fragment | RKKDWDPKKYGGFDSPTVAYSVLVVAKVEKGKSKKLKSVKELLGITIMERSSFEK | |
| | NPIDFLEAKGYKEVKKDLIIKLPKYSLFELENGRKRMLASAGELQKGNELALPSK | |
| | YVNFLYLASHYEKLKGSPEDNEQKQLFVEQHKHYLDEIIEQISEFSKRVILADAN | |
| | LDKVLSAYNKHRDKPIREQAENIIHLFTLTNLGAPAAFKYFDTTIDRKRYTSTKE | |
| | VLDATLIHQSITGLYETRIDLSQLGGD | |
| CP1028 C- | EIGKATAKYFFYSNIMNFFKTEITLANGEIRKRPLIETNGETGEIVWDKGRDFAT | 70 |
| terminal | VRKVLSMPQVNIVKKTEVQTGGFSKESILPKRNSDKLIARKKDWDPKKYGGFDSP | |
| fragment | TVAYSVLVVAKVEKGKSKKLKSVKELLGITIMERSSFEKNPIDFLEAKGYKEVKK | |
| | DLIIKLPKYSLFELENGRKRMLASAGELQKGNELALPSKYVNFLYLASHYEKLKG | |
| | SPEDNEQKQLFVEQHKHYLDEIIEQISEFSKRVILADANLDKVLSAYNKHRDKPI | |
| | REQAENIIHLFTLTNLGAPAAFKYFDTTIDRKRYTSTKEVLDATLIHQSITGLYE | |
| | TRIDLSQLGGD | |
| CP1041 C- | NIMNFFKTEITLANGEIRKRPLIETNGETGEIVWDKGRDFATVRKVLSMPQVNIV | 71 |
| terminal | KKTEVQTGGFSKESILPKRNSDKLIARKKDWDPKKYGGFDSPTVAYSVLVVAKVE | |
| fragment | KGKSKKLKSVKELLGITIMERSSFEKNPIDFLEAKGYKEVKKDLIIKLPKYSLFE | |
| | LENGRKRMLASAGELQKGNELALPSKYVNFLYLASHYEKLKGSPEDNEQKQLFVE | |
| | QHKHYLDEIIEQISEFSKRVILADANLDKVLSAYNKHRDKPIREQAENIIHLFTL | |
| | TNLGAPAAFKYFDTTIDRKRYTSTKEVLDATLIHQSITGLYETRIDLSQLGGD | |
| CP1249 C- | PEDNEQKQLFVEQHKHYLDEIIEQISEFSKRVILADANLDKVLSAYNKHRDKPIR | 72 |
| terminal | EQAENIIHLFTLTNLGAPAAFKYFDTTIDRKRYTSTKEVLDATLIHQSITGLYET | |
| fragment | RIDLSQLGGD | |
| CP1300 C- | KPIREQAENIIHLFTLTNLGAPAAFKYFDTTIDRKRYTSTKEVLDATLIHQSITG | 73 |
| terminal | LYETRIDLSQLGGD | |
| fragment | | |

(10) Cas9 Variants with Modified PAM Specificities

[0243] The base editors of the present disclosure may also comprise Cas9 variants with modified PAM specificities. For example, the base editors described herein may utilize any naturally occurring or engineered variant of SpCas9 having expanded and/or relaxed PAM specificities which are described in the literature, including in Nishimasu et al., “Engineered CRISPR-Cas9 nuclease with expanded targeting space,” Science, 2018, 361: 1259-1262; Chatterjee et al., “Robust Genome Editing of Single-Base PAM Targets with Engineered ScCas9 Variants,” BioRxiv, Apr. 26, 2019. Some aspects of this disclosure provide Cas9 proteins that exhibit activity on a target sequence that does not comprise the canonical PAM (5′-NGG-3′, where N is A, C, G, or T) at its 3′-end. In some embodiments, the Cas9 protein exhibits activity on a target sequence comprising a 5′-NGG-3′ PAM sequence at its 3′-end. In some embodiments, the Cas9 protein exhibits activity on a target sequence comprising a 5′-NNG-3′ PAM sequence at its 3′-end. In some embodiments, the Cas9 protein exhibits activity on a target sequence comprising a 5′-NNA-3′ PAM sequence at its 3′-end. In some embodiments, the Cas9 protein exhibits activity on a target sequence comprising a 5′-NNC-3′ PAM sequence at its 3′-end. In some embodiments, the Cas9 protein exhibits activity on a target sequence comprising a 5′-NNT-3′ PAM sequence at its 3′-end. In some embodiments, the Cas9 protein exhibits activity on a target sequence comprising a 5′-NGT-3′ PAM sequence at its 3′-end. In some embodiments, the Cas9 protein exhibits activity on a target sequence comprising a 5′-NGA-3′ PAM sequence at its 3′-end. In some embodiments, the Cas9 protein exhibits activity on a target sequence comprising a 5′-NGC-3′ PAM sequence at its 3′-end. In some embodiments, the Cas9 protein exhibits activity on a target sequence comprising a 5′-NAA-3′ PAM sequence at its 3′-end. In some embodiments, the Cas9 protein exhibits activity on a target sequence comprising a 5′-NAC-3′ PAM sequence at its 3′-end. In some embodiments, the Cas9 protein exhibits activity on a target sequence comprising a 5′-NAT-3′ PAM sequence at its 3′-end. In still other embodiments, the Cas9 protein exhibits activity on a target sequence comprising a 5′-NAG-3′ PAM sequence at its 3′-end.

[0244] It should be appreciated that any of the amino acid mutations described herein, (e.g., A262T) from a first amino acid residue (e.g., A) to a second amino acid residue (e.g., T) may also include mutations from the first amino acid residue to an amino acid residue that is similar to (e.g., conserved) the second amino acid residue. For example, mutation of an amino acid with a hydrophobic side chain (e.g., alanine, valine, isoleucine, leucine, methionine, phenylalanine, tyrosine, or tryptophan) may be a mutation to a second amino acid with a different hydrophobic side chain (e.g., alanine, valine, isoleucine, leucine, methionine, phenylalanine, tyrosine, or tryptophan). For example, a mutation of an alanine to a threonine (e.g., a A262T mutation) may also be a mutation from an alanine to an amino acid that is similar in size and chemical properties to a threonine, for example, serine. As another example, mutation of an amino acid with a positively charged side chain (e.g., arginine, histidine, or lysine) may be a mutation to a second amino acid with a different positively charged side chain (e.g., arginine, histidine, or lysine). As another example, mutation of an amino acid with a polar side chain (e.g., serine, threonine, asparagine, or glutamine) may be a mutation to a second amino acid with a different polar side chain (e.g., serine, threonine, asparagine, or glutamine). Additional similar amino acid pairs include, but are not limited to, the following: phenylalanine and tyrosine; asparagine and glutamine; methionine and cysteine; aspartic acid and glutamic acid; and arginine and lysine. The skilled artisan would recognize that such conservative amino acid substitutions will likely have minor effects on protein structure and are likely to be well tolerated without compromising function. In some embodiments, any amino of the amino acid mutations provided herein from one amino acid to a threonine may be an amino acid mutation to a serine. In some embodiments, any amino of the amino acid mutations provided herein from one amino acid to an arginine may be an amino acid mutation to a lysine. In some embodiments, any amino of the amino acid mutations provided herein from one amino acid to an isoleucine, may be an amino acid mutation to an alanine, valine, methionine, or leucine. In some embodiments, any amino of the amino acid mutations provided herein from one amino acid to a lysine may be an amino acid mutation to an arginine. In some embodiments, any amino of the amino acid mutations provided herein from one amino acid to an aspartic acid may be an amino acid mutation to a glutamic acid or asparagine. In some embodiments, any amino of the amino acid mutations provided herein from one amino acid to a valine may be an amino acid mutation to an alanine, isoleucine, methionine, or leucine. In some embodiments, any amino of the amino acid mutations provided herein from one amino acid to a glycine may be an amino acid mutation to an alanine. It should be appreciated, however, that additional conserved amino acid residues would be recognized by the skilled artisan and any of the amino acid mutations to other conserved amino acid residues are also within the scope of this disclosure. In some embodiments, the Cas9 protein comprises a combination of mutations that exhibit activity on a target sequence comprising a 5′-NAA-3′ PAM sequence at its 3′-end. In some embodiments, the combination of mutations are present in any one of the clones listed in Table 1. In some embodiments, the combination of mutations are conservative mutations of the clones listed in Table 1. In some embodiments, the Cas9 protein comprises the combination of mutations of any one of the Cas9 clones listed in Table 1.

TABLE 1
NAA PAM Clones
Mutations from wild-type SpCas9 (e.g., SEQ ID NO: 5)

D177N, K218R, D614N, D1135N, P1137S, E1219V, A1320V, A1323D, R1333K
D177N, K218R, D614N, D1135N, E1219V, Q1221H, H1264Y, A1320V, R1333K
A10T, I322V, S409I, E427G, G715C, D1135N, E1219V, Q1221H, H1264Y, A1320V, R1333K
A367T, K710E, R1114G, D1135N, P1137S, E1219V, Q1221H, H1264Y, A1320V, R1333K
A10T, I322V, S409I, E427G, R753G, D861N, D1135N, K1188R, E1219V, Q1221H, H1264H,
A1320V, R1333K
A10T, I322V, S409I, E427G, R654L, V743I, R753G, M1021T, D1135N, D1180G, K1211R,
E1219V, Q1221H, H1264Y, A1320V, R1333K
A10T, I322V, S409I, E427G, V743I, R753G, E762G, D1135N, D1180G, K1211R, E1219V,
Q1221H, H1264Y, A1320V, R1333K
A10T, I322V, S409I, E427G, R753G, D1135N, D1180G, K1211R, E1219V, Q1221H, H1264Y,
S1274R, A1320V, R1333K
A10T, I322V, S409I, E427G, A589S, R753G, D1135N, E1219V, Q1221H, H1264H, A1320V,
R1333K
A10T, I322V, S409I, E427G, R753G, E757K, G865G, D1135N, E1219V, Q1221H, H1264Y,
A1320V, R1333K
A10T, I322V, S409I, E427G, R654L, R753G, E757K, D1135N, E1219V, Q1221H, H1264Y,
A1320V, R1333K
A10T, I322V, S409I, E427G, K599R, M631A, R654L, K673E, V743I, R753G, N758H, E762G,
D1135N, D1180G, E1219V, Q1221H, Q1256R, H1264Y, A1320V, A1323D, R1333K
A10T, I322V, S409I, E427G, R654L, K673E, V743I, R753G, E762G, N869S, N1054D, R1114G,
D1135N, D1180G, E1219V, Q1221H, H1264Y, A1320V, A1323D, R1333K
A10T, I322V, S409I, E427G, R654L, L727I, V743I, R753G, E762G, R859S, N946D, F1134L,
D1135N, D1180G, E1219V, Q1221H, H1264Y, N1317T, A1320V, A1323D, R1333K
A10T, I322V, S409I, E427G, R654L, K673E, V743I, R753G, E762G, N803S, N869S, Y1016D,
G1077D, R1114G, F1134L, D1135N, D1180G, E1219V, Q1221H, H1264Y, V1290G, L1318S,
A1320V, A1323D, R1333K
A10T, I322V, S409I, E427G, R654L, K673E, V743I, R753G, E762G, N803S, N869S, Y1016D,
G1077D, R1114G, F1134L, D1135N, K1151E, D1180G, E1219V, Q1221H, H1264Y, V1290G,
L1318S, A1320V, R1333K
A10T, I322V, S409I, E427G, R654L, K673E, V743I, R753G, E762G, N803S, N869S, Y1016D,
G1077D, R1114G, F1134L, D1135N, D1180G, E1219V, Q1221H, H1264Y, V1290G, L1318S,
A1320V, A1323D, R1333K
A10T, I322V, S409I, E427G, R654L, K673E, F693L, V743I, R753G, E762G, N803S, N869S,
L921P, Y1016D, G1077D, F1080S, R1114G, D1135N, D1180G, E1219V, Q1221H, H1264Y,
L1318S, A1320V, A1323D, R1333K
A10T, I322V, S409I, E427G, E630K, R654L, K673E, V743I, R753G, E762G, Q768H, N803S,
N869S, Y1016D, G1077D, R1114G, F1134L, D1135N, D1180G, E1219V, Q1221H, H1264Y,
L1318S, A1320V, R1333K
A10T, I322V, S409I, E427G, R654L, K673E, F693L, V743I, R753G, E762G, Q768H, N803S,
N869S, Y1016D, G1077D, R1114G, F1134L, D1135N, D1180G, E1219V, Q1221H, G1223S,
H1264Y, L1318S, A1320V, R1333K
A10T, I322V, S409I, E427G, R654L, K673E, F693L, V743I, R753G, E762G, N803S, N869S,
L921P, Y1016D, G1077D, F1801S, R1114G, D1135N, D1180G, E1219V, Q1221H, H1264Y,
L1318S, A1320V, A1323D, R1333K
A10T, I322V, S409I, E427G, R654L, V743I, R753G, M1021T, D1135N, D1180G, K1211R,
E1219V, Q1221H, H1264Y, A1320V, R1333K
A10T, I322V, S409I, E427G, R654L, K673E, V743I, R753G, E762G, M673I, N803S, N869S,
G1077D, R1114G, D1135N, V1139A, D1180G, E1219V, Q1221H, A1320V, R1333K
A10T, I322V, S409I, E427G, R654L, K673E, V743I, R753G, E762G, N803S, N869S, R1114G,
D1135N, E1219V, Q1221H, A1320V, R1333K

[0245] In some embodiments, the Cas9 protein comprises an amino acid sequence that is at least 80% identical to the amino acid sequence of a Cas9 protein as provided by any one of the variants of Table 1. In some embodiments, the Cas9 protein comprises an amino acid sequence that is at least 85%, at least 90%, at least 92%, at least 95%, at least 96%, at least 97%, at least 98%, at least 99%, or at least 99.5% identical to the amino acid sequence of a Cas9 protein as provided by any one of the variants of Table 1.

[0246] In some embodiments, the Cas9 protein exhibits an increased activity on a target sequence that does not comprise the canonical PAM (5′-NGG-3′) at its 3′ end as compared to Streptococcus pyogenes Cas9 as provided by SEQ ID NO: 5. In some embodiments, the Cas9 protein exhibits an activity on a target sequence having a 3′ end that is not directly adjacent to the canonical PAM sequence (5′-NGG-3′) that is at least 5-fold increased as compared to the activity of Streptococcus pyogenes Cas9 as provided by SEQ ID NO: 5 on the same target sequence. In some embodiments, the Cas9 protein exhibits an activity on a target sequence that is not directly adjacent to the canonical PAM sequence (5′-NGG-3′) that is at least 10-fold, at least 50-fold, at least 100-fold, at least 500-fold, at least 1,000-fold, at least 5,000-fold, at least 10,000-fold, at least 50,000-fold, at least 100,000-fold, at least 500,000-fold, or at least 1,000,000-fold increased as compared to the activity of Streptococcus pyogenes as provided by SEQ ID NO: 5 on the same target sequence. In some embodiments, the 3′ end of the target sequence is directly adjacent to an AAA, GAA, CAA, or TAA sequence. In some embodiments, the Cas9 protein comprises a combination of mutations that exhibit activity on a target sequence comprising a 5′-NAC-3′ PAM sequence at its 3′-end. In some embodiments, the combination of mutations are present in any one of the clones listed in Table 2. In some embodiments, the combination of mutations are conservative mutations of the clones listed in Table 2. In some embodiments, the Cas9 protein comprises the combination of mutations of any one of the Cas9 clones listed in Table 2.

TABLE 2
NAC PAM Clones
MUTATIONS FROM WILD-TYPE SPCAS9 (E.G., SEC ID NO: 5)

T472I, R753G, K890E, D1332N, R1335Q, T1337N
I1057S, D1135N, P1301S, R1335Q, T1337N
T472I, R753G, D1332N, R1335Q, T1337N
D1135N, E1219V, D1332N, R1335Q, T1337N
T472I, R753G, K890E, D1332N, R1335Q, T1337N
I1057S, D1135N, P1301S, R1335Q, T1337N
T472I, R753G, D1332N, R1335Q, T1337N
T472I, R753G, Q771H, D1332N, R1335Q, T1337N
E627K, T638P, K652T, R753G, N803S, K959N, R1114G, D1135N, E1219V, D1332N, R1335Q,
T1337N
E627K, T638P, K652T, R753G, N803S, K959N, R1114G, D1135N, K1156E, E1219V, D1332N,
R1335Q, T1337N
E627K, T638P, V647I, R753G, N803S, K959N, G1030R, I1055E, R1114G, D1135N, E1219V,
D1332N, R1335Q, T1337N
E627K, E630G, T638P, V647A, G687R, N767D, N803S, K959N, R1114G, D1135N, E1219V,
D1332G, R1335Q, T1337N
E627K, T638P, R753G, N803S, K959N, R1114G, D1135N, E1219V, N1266H,D1332N, R1335Q,
T1337N
E627K, T638P, R753G, N803S, K959N, I1057T, R1114G, D1135N, E1219V, D1332N, R1335Q,
T1337N
E627K, T638P, R753G, N803S, K959N, R1114G, D1135N, E1219V, D1332N, R1335Q, T1337N
E627K, M631I, T638P, R753G, N803S, K959N, Y1036H, R1114G, D1135N, E1219V, D1251G,
D1332G, R1335Q, T1337N
E627K, T638P, R753G, N803S, V875I, K959N, Y1016C, R1114G, D1135N, E1219V, D1251G,
D1332G, R1335Q, T1337N, 11348V
K608R, E627K, T638P, V647I, R654L, R753G, N803S, T804A, K848N, V922A, K959N, R1114G,
D1135N, E1219V, D1332N, R1335Q, T1337N
K608R, E627K, T638P, V647I, R753G, N803S, V922A, K959N, K1014N, V1015A,R1114G,
D1135N, K1156N, E1219V, N1252D, D1332N, R1335Q, T1337N
K608R, E627K, R629G, T638P, V647I, A711T, R753G, K775R, K789E, N803S, K959N, V1015A,
Y1036H, R1114G, D1135N, E1219V, N1286H, D1332N, R1335Q, T1337N
K608R, E627K, T638P, V647I, T740A, R753G, N803S, K948E, K959N, Y1016S, R1114G,
D1135N, E1219V, N1286H, D1332N, R1335Q, T1337N
K608R, E627K, T638P, V647I, T740A, N803S, K948E, K959N, Y1016S, R1114G, D1135N,
E1219V, N1286H, D1332N, R1335Q, T1337N
I670S, K608R, E627K, E630G, T638P, V647I, R653K, R753G, I795L, K797N, N803S, K866R,
K890N, K959N, Y1016C, R1114G, D1135N, E1219V, D1332N, R1335Q, T1337N
K608R, E627K, T638P, V647I, T740A, G752R, R753G, K797N, N803S, K948E, K959N, V1015A,
Y1016S, R1114G, D1135N, E1219V, N1266H, D1332N, R1335Q, T1337N
I570T, A589V, K608R, E627K, T638P, V647I, R654L, Q716R, R753G, N803S, K948E, K959N,
Y1016S, R1114G, D1135N, E1207G, E1219V, N1234D, D1332N, R1335Q, T1337N
K608R, E627K, R629G, T638P, V647I, R654L, Q740R, R753G, N803S, K959N, N990S, T995S,
V1015A, Y1036D, R1114G, D1135N, E1207G, E1219V, N1234D, N1266H, D1332N, R1335Q,
T1337N
I562F, V565D, I570T, K608R, L625S, E627K, T638P, V647I, R654I, G752R, R753G, N803S,
N808D, K959N, M1021L, R1114G, D1135N, N1177S, N1234D, D1332N, R1335Q, T1337N
I562F, I570T, K608R, E627K, T638P, V647I, R753G, E790A, N803S, K959N, V1015A, Y1036H,
R1114G, D1135N, D1180E, A1184T, E1219V, D1332N, R1335Q, T1337N
I570T, K608R, E627K, T638P, V647I, R654H, R753G, E790A, N803S, K959N, V1015A, R1114G,
D1127A, D1135N, E1219V, D1332N, R1335Q, T1337N
I570T, K608R, L625S, E627K, T638P, V647I, R654I, T703P, R753G, N803S, N808D, K959N,
M1021L, R1114G, D1135N, E1219V, D1332N, R1335Q, T1337N
I570S, K608R, E627K, E630G, T638P, V647I, R653K, R753G, I795L, N803S, K866R, K890N,
K959N, Y1016C, R1114G, D1135N, E1219V, D1332N, R1335Q, T1337N
I570T, K608R, E627K, T638P, V647I, R654H, R753G, E790A, N803S, K959N, V1016A, R1114G,
D1135N, E1219V, K1246E, D1332N, R1335Q, T1337N
K608R, E627K, T638P, V647I, R654L, K673E, R753G, E790A, N803S, K948E, K959N, R1114G,
D1127G, D1135N, D1180E, E1219V, N1286H, D1332N, R1335Q, T1337N
K608R, L625S, E627K, T638P, V647I, R654I, I670T, R753G, N803S, N808D, K959N, M1021L,
R1114G, D1135N, E1219V, N1286H, D1332N, R1335Q, T1337N
E627K, M631V, T638P, V647I, K710E, R753G, N803S, N808D, K948E, M1021L, R1114G,
D1135N, E1219V, D1332N, R1335Q, T1337N, S1338T, H1349R

[0247] In some embodiments, the Cas9 protein comprises an amino acid sequence that is at least 80% identical to the amino acid sequence of a Cas9 protein as provided by any one of the variants of Table 2. In some embodiments, the Cas9 protein comprises an amino acid sequence that is at least 85%, at least 90%, at least 92%, at least 95%, at least 96%, at least 97%, at least 98%, at least 99%, or at least 99.5% identical to the amino acid sequence of a Cas9 protein as provided by any one of the variants of Table 2.

[0248] In some embodiments, the Cas9 protein exhibits an increased activity on a target sequence that does not comprise the canonical PAM (5′-NGG-3′) at its 3′ end as compared to Streptococcus pyogenes Cas9 as provided by SEQ ID NO: 5. In some embodiments, the Cas9 protein exhibits an activity on a target sequence having a 3′ end that is not directly adjacent to the canonical PAM sequence (5′-NGG-3′) that is at least 5-fold increased as compared to the activity of Streptococcus pyogenes Cas9 as provided by SEQ ID NO: 5 on the same target sequence. In some embodiments, the Cas9 protein exhibits an activity on a target sequence that is not directly adjacent to the canonical PAM sequence (5′-NGG-3′) that is at least 10-fold, at least 50-fold, at least 100-fold, at least 500-fold, at least 1,000-fold, at least 5,000-fold, at least 10,000-fold, at least 50,000-fold, at least 100,000-fold, at least 500,000-fold, or at least 1,000,000-fold increased as compared to the activity of Streptococcus pyogenes as provided by SEQ ID NO: 5 on the same target sequence. In some embodiments, the 3′ end of the target sequence is directly adjacent to an AAC, GAC, CAC, or TAC sequence.

[0249] In some embodiments, the Cas9 protein comprises a combination of mutations that exhibit activity on a target sequence comprising a 5′-NAT-3′ PAM sequence at its 3′-end. In some embodiments, the combination of mutations are present in any one of the clones listed in Table 3. In some embodiments, the combination of mutations are conservative mutations of the clones listed in Table 3. In some embodiments, the Cas9 protein comprises the combination of mutations of any one of the Cas9 clones listed in Table 3.

TABLE 3
NAT PAM Clones
MUTATIONS FROM WILD-TYPE SPCAS9 (E.G., SEQ ID NO: 5)

K961E, H985Y, D1135N, K1191N, E1219V, Q1221H, A1320A, P1321S, R1335L
D1135N, G1218S, E1219V, Q1221H, P1249S, P1321S, D1322G, R1335L
V743I, R753G, E790A, D1135N, G1218S, E1219V, Q1221H, A1227V, P1249S, N1286K, A1293T,
P1321S, D1322G, R1335L, T1339I
F575S, M631L, R654L, V748I, V743I, R753G, D853E, V922A, R1114G D1135N, G1218S,
E1219V, Q1221H, A1227V, P1249S, N1286K, A1293T, P1321S, D1322G, R1335L, T1339I
F575S, M631L, R654L, R664K, R753G, D853E, V922A, R1114G D1135N, D1180G, G1218S,
E1219V, Q1221H, P1249S, N1286K, P1321S, D1322G, R1335L
M631L, R654L, R753G, K797E, D853E, V922A, D1012A, R1114G D1135N, G1218S, E1219V,
Q1221H, P1249S, N1317K, P1321S, D1322G, R1335L
F575S, M631L, R654L, R664K, R753G, D853E, V922A, R1114G, Y1131C, D1135N, D1180G,
G1218S, E1219V, Q1221H, P1249S, P1321S, D1322G, R1335L
F575S, M631L, R654L, R664K, R753G, D853E, V922A, R1114G, Y1131C, D1135N, D1180G,
G1218S, E1219V, Q1221H, P1249S, P1321S, D1322G, R1335L
F575S, D596Y, M631L, R654L, R664K, R753G, D853E, V922A, R1114G, Y1131C, D1135N,
D1180G, G1218S, E1219V, Q1221H, P1249S, Q1256R, P1321S, D1322G, R1335L
F575S, M631L, R654L, R664K, K710E, V750A, R753G, D853E, V922A, R1114G, Y1131C,
D1135N, D1180G, G1218S, E1219V, Q1221H, P1249S, P1321S, D1322G, R1335L
F575S, M631L, K649R, R654L, R664K, R753G, D853E, V922A, R1114G, Y1131C, D1135N,
K1156E, D1180G, G1218S, E1219V, Q1221H, P1249S, P1321S, D1322G, R1335L
F575S, M631L, R654L, R664K, R753G, D853E, V922A, R1114G, Y1131C, D1135N, D1180G,
G1218S, E1219V, Q1221H, P1249S, P1321S, D1322G, R1335L
F575S, M631L, R654L, R664K, R753G, D853E, V922A, I1057G, R1114G, Y1131C, D1135N,
D1180G, G1218S, E1219V, Q1221H, P1249S, N1308D, P1321S, D1322G, R1335L
M631L, R654L, R753G, D853E, V922A, R1114G, Y1131C, D1135N, E1150V, D1180G, G1218S,
E1219V, Q1221H, P1249S, P1321S, D1332G, R1335L
M631L, R654L, R664K, R753G, D853E, 11057V, Y1131C, D1135N, D1180G, G1218S, E1219V,
Q1221H, P1249S, P1321S, D1332G, R1335L
M631L, R654L, R664K, R753G, 11057V, R1114G, Y1131C, D1135N, D1180G, G1218S, E1219V,
Q1221H, P1249S, P1321S, D1332G, R1335L

(i) The above description of various napDNAbps which can be used in connection with the presently disclose base editors is not meant to be limiting in any way. The base editors may comprise the canonical SpCas9, or any ortholog Cas9 protein, or any variant Cas9 protein—including any naturally occurring variant, mutant, or otherwise engineered version of Cas9—that is known or which can be made or evolved through a directed evolutionary or otherwise mutagenic process. In various embodiments, the Cas9 or Cas9 variants have a nickase activity, i.e., only cleave of strand of the target DNA sequence. In other embodiments, the Cas9 or Cas9 variants have inactive nucleases, i.e., are “dead” Cas9 proteins. Other variant Cas9 proteins that may be used are those having a smaller molecular weight than the canonical SpCas9 (e.g., for easier delivery) or having modified or rearranged primary amino acid structure (e.g., the circular permutant formats). The base editors described herein may also comprise Cas9 equivalents, including Cas12a/Cpf1 and Cas12b proteins which are the result of convergent evolution. The napDNAbps used herein (e.g., SpCas9, Cas9 variant, or Cas9 equivalents) may also may also contain various modifications that alter/enhance their PAM specifities. Lastly, the application contemplates any Cas9, Cas9 variant, or Cas9 equivalent which has at least 70%, at least 75%, at least 80%, at least 85%, at least 90%, at least 91%, at least 92%, at least 93%, at least 94%, at least 95%, at least 96%, at least 97%, at least 98%, at least 99%, or at least 99.9% sequence identity to a reference Cas9 sequence, such as a references SpCas9 canonical sequences or a reference Cas9 equivalent (e.g., Cas12a/Cpf1).

[0250] In a particular embodiment, the Cas9 variant having expanded PAM capabilities is SpCas9 (H840A) VRQR, having the following amino acid sequence (with the V, R, Q, R substitutions relative to the SpCas9 (H840A) of SEQ ID NO: 42 show in bold underline. In addition, the methionine residue in SpCas9 (H840) was removed for SpCas9 (H840A) VRQR) (“SpCas9-VRQR”). This SpCas9 variant possesses an altered PAM-specificity which recognizes a PAM of 5′-NGA-3′ instead of the canonical PAM of 5′-NGG-3′:

SpCas9-VRQR
(SEQ ID NO: 74)
DKKYSIGLDIGTNSVGWAVITDEYKVPSKKFKVLGNTDRHSIKKNLIGAL
LFDSGETAEATRLKRTARRRYTRRKNRICYLQEIFSNEMAKVDDSFFHRL
EESFLVEEDKKHERHPIFGNIVDEVAYHEKYPTIYHLRKKLVDSTDKADL
RLIYLALAHMIKFRGHFLIEGDLNPDNSDVDKLFIQLVQTYNQLFEENPI
NASGVDAKAILSARLSKSRRLENLIAQLPGEKKNGLFGNLIALSLGLTPN
FKSNFDLAEDAKLQLSKDTYDDDLDNLLAQIGDQYADLFLAAKNLSDAIL
LSDILRVNTEITKAPLSASMIKRYDEHHQDLTLLKALVRQQLPEKYKEIF
FDQSKNGYAGYIDGGASQEEFYKFIKPILEKMDGTEELLVKLNREDLLRK
QRTFDNGSIPHQIHLGELHAILRRQEDFYPFLKDNREKIEKILTFRIPYY
VGPLARGNSRFAWMTRKSEETITPWNFEEVVDKGASAQSFIERMTNFDKN
LPNEKVLPKHSLLYEYFTVYNELTKVKYVTEGMRKPAFLSGEQKKAIVDL
LFKTNRKVTVKQLKEDYFKKIECFDSVEISGVEDRFNASLGTYHDLLKII
KDKDFLDNEENEDILEDIVLTLTLFEDREMIEERLKTYAHLFDDKVMKQL
KRRRYTGWGRLSRKLINGIRDKQSGKTILDFLKSDGFANRNFMQLIHDDS
LTFKEDIQKAQVSGQGDSLHEHIALNAGSPAIKKGILQTVKVVDELVKVM
GRHKPENIVIEMARENQTTQKGQKNSRERMKRIEEGIKELGSQILKEHPV
ENTQLQNEKLYLYYLQNGRDMYVDQELDINRLSDYDVDAIVPQSFLKDDS
IDNKVLTRSDKNRGKSDNVPSEEVVKKMKNYWRQLLNAKLITQRKFDNLT
KAERGGLSELDKAGFIKRQLVETRQITKHVAQILDSRMNTKYDENDKLIR
EVKVITLKSKLVSDFRKDFQFYKVREINNYHHAHDAYLNAVVGTALIKKY
PKLESEFVYGDYKVYDVRKMIAKSEQEIGKATAKYFFYSNIMNFFKTEIT
LANGEIRKRPLIETNGETGEIVWDKGRDFATVRKVLSMPQVNIVKKTEVQ
TGGFSKESILPKRNSDKLIARKKDWDPKKYGGFVSPTVAYSVLVVAKVEK
GKSKKLKSVKELLGITIMERSSFEKNPIDFLEAKGYKEVKKDLIIKLPKY
SLFELENGRKRMLASARELQKGNELALPSKYVNFLYLASHYEKLKGSPED
NEQKQLFVEQHKHYLDEIIEQISEFSKRVILADANLDKVLSAYNKHRDKP
IREQAENIIHLFTLTNLGAPAAFKYFDTTIDRKQYRSTKEVLDATLIHQS
ITGLYETRIDLSQLGGD

[0251] In another particular embodiment, the Cas9 variant having expanded PAM capabilities is SpCas9 (H840A) VQR, having the following amino acid sequence (with the V, Q, R substitutions relative to the SpCas9 (H840A) of SEQ ID NO: 42 show in bold underline. In addition, the methionine residue in SpCas9 (H840) was removed for SpCas9 (H840A) VRQR) (“SpCas9-VQR”). This SpCas9 variant possesses an altered PAM-specificity which recognizes a PAM of 5′-NGA-3′ instead of the canonical PAM of 5′-NGG-3′:

SpCas9-VQR
(SEQ ID NO: 75)
DKKYSIGLDIGTNSVGWAVITDEYKVPSKKFKVLGNTDRHSIKKNLIGALLFDSGETAEATRLKRTARRRYTRRKNRICYL
QEIFSNEMAKVDDSFFHRLEESFLVEEDKKHERHPIFGNIVDEVAYHEKYPTIYHLRKKLVDSTDKADLRLIYLALAHMIK
FRGHFLIEGDLNPDNSDVDKLFIQLVQTYNQLFEENPINASGVDAKAILSARLSKSRRLENLIAQLPGEKKNGLFGNLIAL
SLGLTPNFKSNFDLAEDAKLQLSKDTYDDDLDNLLAQIGDQYADLFLAAKNLSDAILLSDILRVNTEITKAPLSASMIKRY
DEHHQDLTLLKALVRQQLPEKYKEIFFDQSKNGYAGYIDGGASQEEFYKFIKPILEKMDGTEELLVKLNREDLLRKQRTFD
NGSIPHQIHLGELHAILRRQEDFYPFLKDNREKIEKILTFRIPYYVGPLARGNSRFAWMTRKSEETITPWNFEEVVDKGAS
AQSFIERMTNFDKNLPNEKVLPKHSLLYEYFTVYNELTKVKYVTEGMRKPAFLSGEQKKAIVDLLFKTNRKVTVKQLKEDY
FKKIECFDSVEISGVEDRFNASLGTYHDLLKIIKDKDFLDNEENEDILEDIVLTLTLFEDREMIEERLKTYAHLFDDKVMK
QLKRRRYTGWGRLSRKLINGIRDKQSGKTILDFLKSDGFANRNFMQLIHDDSLTFKEDIQKAQVSGQGDSLHEHIANLAGS
PAIKKGILQTVKVVDELVKVMGRHKPENIVIEMARENQTTQKGQKNSRERMKRIEEGIKELGSQILKEHPVENTQLQNEKL
YLYYLQNGRDMYVDQELDINRLSDYDVDAIVPQSFLKDDSIDNKVLTRSDKNRGKSDNVPSEEVVKKMKNYWRQLLNAKLI
TQRKFDNLTKAERGGLSELDKAGFIKRQLVETRQITKHVAQILDSRMNTKYDENDKLIREVKVITLKSKLVSDFRKDFQFY
KVREINNYHHAHDAYLNAVVGTALIKKYPKLESEFVYGDYKVYDVRKMIAKSEQEIGKATAKYFFYSNIMNFFKTEITLAN
GEIRKRPLIETNGETGEIVWDKGRDFATVRKVLSMPQVNIVKKTEVQTGGFSKESILPKRNSDKLIARKKDWDPKKYGGFV
SPTVAYSVLVVAKVEKGKSKKLKSVKELLGITIMERSSFEKNPIDFLEAKGYKEVKKDLIIKLPKYSLFELENGRKRMLAS
AGELQKGNELALPSKYVNFLYLASHYEKLKGSPEDNEQKQLFVEQHKHYLDEIIEQISEFSKRVILADANLDKVLSAYNKH
RDKPIREQAENIIHLFTLTNLGAPAAFKYFDTTIDRKQYRSTKEVLDATLIHQSITGLYETRIDLSQLGGD

[0252] In another particular embodiment, the Cas9 variant having expanded PAM capabilities is SpCas9 (H840A) VRER, having the following amino acid sequence (with the V, R, E, R substitutions relative to the SpCas9 (H840A) of SEQ ID NO: 42 are shown in bold underline. In addition, the methionine residue in SpCas9 (H840) was removed for SpCas9 (H840A) VRER) (“SpCas9-VRER”). This SpCas9 variant possesses an altered PAM-specificity which recognizes a PAM of 5′-NGCG-3′ instead of the canonical PAM of 5′-NGG-3′:

SpCas9-VRER
(SEQ ID NO: 76)
DKKYSIGLDIGTNSVGWAVITDEYKVPSKKFKVLGNTDRHSIKKNLIGALLFDSGETAEATRLKRTARRRYTRRKNRICYL
QEIFSNEMAKVDDSFFHRLEESFLVEEDKKHERHPIFGNIVDEVAYHEKYPTIYHLRKKLVDSTDKADLRLIYLALAHMIK
FRGHFLIEGDLNPDNSDVDKLFIQLVQTYNQLFEENPINASGVDAKAILSARLSKSRRLENLIAQLPGEKKNGLFGNLIAL
SLGLTPNFKSNFDLAEDAKLQLSKDTYDDDLDNLLAQIGDQYADLFLAAKNLSDAILLSDILRVNTEITKAPLSASMIKRY
DEHHQDLTLLKALVRQQLPEKYKEIFFDQSKNGYAGYIDGGASQEEFYKFIKPILEKMDGTEELLVKLNREDLLRKQRTFD
NGSIPHQIHLGELHAILRRQEDFYPFLKDNREKIEKILTFRIPYYVGPLARGNSRFAWMTRKSEETITPWNFEEVVDKGAS
AQSFIERMTNFDKNLPNEKVLPKHSLLYEYFTVYNELTKVKYVTEGMRKPAFLSGEQKKAIVDLLFKTNRKVTVKQLKEDY
FKKIECFDSVEISGVEDRFNASLGTYHDLLKIIKDKDFLDNEENEDILEDIVLTLTLFEDREMIEERLKTYAHLFDDKVMK
QLKRRRYTGWGRLSRKLINGIRDKQSGKTILDFLKSDGFANRNFMQLIHDDSLTFKEDIQKAQVSGQGDSLHEHIANLAGS
PAIKKGILQTVKVVDELVKVMGRHKPENIVIEMARENQTTQKGQKNSRERMKRIEEGIKELGSQILKEHPVENTQLQNEKL
YLYYLQNGRDMYVDQELDINRLSDYDVDAIVPQSFLKDDSIDNKVLTRSDKNRGKSDNVPSEEVVKKMKNYWRQLLNAKLI
TQRKFDNLTKAERGGLSELDKAGFIKRQLVETRQITKHVAQILDSRMNTKYDENDKLIREVKVITLKSKLVSDFRKDFQFY
KVREINNYHHAHDAYLNAVVGTALIKKYPKLESEFVYGDYKVYDVRKMIAKSEQEIGKATAKYFFYSNIMNFFKTEITLAN
GEIRKRPLIETNGETGEIVWDKGRDFATVRKVLSMPQVNIVKKTEVQTGGFSKESILPKRNSDKLIARKKDWDPKKYGGFV
SPTVAYSVLVVAKVEKGKSKKLKSVKELLGITIMERSSFEKNPIDFLEAKGYKEVKKDLIIKLPKYSLFELENGRKRMLAS
ARELQKGNELALPSKYVNFLYLASHYEKLKGSPEDNEQKQLFVEQHKHYLDEIIEQISEFSKRVILADANLDKVLSAYNKH
RDKPIREQAENIIHLFTLTNLGAPAAFKYFDTTIDRKEYRSTKEVLDATLIHQSITGLYETRIDLSQLGGD

[0253] In yet particular embodiment, the Cas9 variant having expanded PAM capabilities is SpCas9-NG, as reported in Nishimasu et al., “Engineered CRISPR-Cas9 nuclease with expanded targeting space,” Science, 2018, 361: 1259-1262, which is incorporated herein by reference. SpCas9-NG (VRVRFRR), having the following amino acid sequence substitutions: R1335V, L1111R, D1135V, G1218R, E1219F, A1322R, and T1337R relative to the canonical SpCas9 sequence (SEQ ID NO: 5. This SpCas9 has a relaxed PAM specificity, i.e., with activity on a PAM of NGH (wherein H=A, T, or C). See Nishimasu et al., “Engineered CRISPR-Cas9 nuclease with expanded targeting space,” Science, 2018, 361: 1259-1262, which is incorporated herein by reference.

SpCas9-NG
(SEO ID NO: 77)
MDKKYSIGLDIGTNSVGWAVITDEYKVPSKKFKVLGNTDRHSIKKNLIGALLFDSGETAEATRLKRTARRRYTRRKNRICY
LQEIFSNEMAKVDDSFFHRLEESFLVEEDKKHERHPIFGNIVDEVAYHEKYPTIYHLRKKLVDSTDKADLRLIYLALAHMI
KFRGHFLIEGDLNPDNSDVDKLFIQLVQTYNQLFEENPINASGVDAKAILSARLSKSRRLENLIAQLPGEKKNGLFGNLIA
LSLGLTPNFKSNFDLAEDAKLQLSKDTYDDDLDNLLAQIGDQYADLFLAAKNLSDAILLSDILRVNTEITKAPLSASMIKR
YDEHHQDLTLLKALVRQQLPEKYKEIFFDQSKNGYAGYIDGGASQEEFYKFIKPILEKMDGTEELLVKLNREDLLRKQRTF
DNGSIPHQIHLGELHAILRRQEDFYPFLKDNREKIEKILTFRIPYYVGPLARGNSRFAWMTRKSEETITPWNFEEVVDKGA
SAQSFIERMTNFDKNLPNEKVLPKHSLLYEYFTVYNELTKVKYVTEGMRKPAFLSGEQKKAIVDLLFKTNRKVTVKQLKED
YFKKIECFDSVEISGVEDRFNASLGTYHDLLKIIKDKDFLDNEENEDILEDIVLTLTLFEDREMIEERLKTYAHLFDDKVM
KQLKRRRYTGWGRLSRKLINGIRDKQSGKTILDFLKSDGFANRNFMQLIHDDSLTFKEDIQKAQVSGQGDSLHEHIANLAG
SPAIKKGILQTVKVVDELVKVMGRHKPENIVIEMARENQTTQKGQKNSRERMKRIEEGIKELGSQILKEHPVENTQLQNEK
LYLYYLQNGRDMYVDQELDINRLSDYDVDHIVPQSFLKDDSIDNKVLTRSDKNRGKSDNVPSEEVVKKMKNYWRQLLNAKL
ITQRKFDNLTKAERGGLSELDKAGFIKRQLVETRQITKHVAQILDSRMNTKYDENDKLIREVKVITLKSKLVSDFRKDFQF
YKVREINNYHHAHDAYLNAVVGTALIKKYPKLESEFVYGDYKVYDVRKMIAKSEQEIGKATAKYFFYSNIMNFFKTEITLA
NGEIRKRPLIETNGETGEIVWDKGRDFATVRKVLSMPQVNIVKKTEVQTGGFSKESIRPKRNSDKLIARKKDWDPKKYGGF
VSPTVAYSVLVVAKVEKGKSKKLKSVKELLGITIMERSSFEKNPIDFLEAKGYKEVKKDLIIKLPKYSLFELENGRKRMLA
SARFLQKGNELALPSKYVNFLYLASHYEKLKGSPEDNEQKQLFVEQHKHYLDEIIEQISEFSKRVILADANLDKVLSAYNK
HRDKPIREQAENIIHLFTLTNLGAPRAFKYFDTTIDRKVYRSTKEVLDATLIHQSITGLYETRIDLSQLGGD

[0254] In addition, any available methods may be utilized to obtain or construct a variant or mutant Cas9 protein. The term “mutation,” as used herein, refers to a substitution of a residue within a sequence, e.g., a nucleic acid or amino acid sequence, with another residue, or a deletion or insertion of one or more residues within a sequence. Mutations are typically described herein by identifying the original residue followed by the position of the residue within the sequence and by the identity of the newly substituted residue. Various methods for making the amino acid substitutions (mutations) provided herein are well known in the art, and are provided by, for example, Green and Sambrook, Molecular Cloning: A Laboratory Manual (4th ed., Cold Spring Harbor Laboratory Press, Cold Spring Harbor, N.Y. (2012)). Mutations can include a variety of categories, such as single base polymorphisms, microduplication regions, indel, and inversions, and is not meant to be limiting in any way. Mutations can include “loss-of-function” mutations which is the normal result of a mutation that reduces or abolishes a protein activity. Most loss-of-function mutations are recessive, because in a heterozygote the second chromosome copy carries an unmutated version of the gene coding for a fully functional protein whose presence compensates for the effect of the mutation. Mutations also embrace “gain-of-function” mutations, which is one which confers an abnormal activity on a protein or cell that is otherwise not present in a normal condition. Many gain-of-function mutations are in regulatory sequences rather than in coding regions, and can therefore have a number of consequences. For example, a mutation might lead to one or more genes being expressed in the wrong tissues, these tissues gaining functions that they normally lack. Because of their nature, gain-of-function mutations are usually dominant.

[0255] Mutations can be introduced into a reference Cas9 protein using site-directed mutagenesis. Older methods of site-directed mutagenesis known in the art rely on sub-cloning of the sequence to be mutated into a vector, such as an M13 bacteriophage vector, that allows the isolation of single-stranded DNA template. In these methods, one anneals a mutagenic primer (i.e., a primer capable of annealing to the site to be mutated but bearing one or more mismatched nucleotides at the site to be mutated) to the single-stranded template and then polymerizes the complement of the template starting from the 3′ end of the mutagenic primer. The resulting duplexes are then transformed into host bacteria and plaques are screened for the desired mutation. More recently, site-directed mutagenesis has employed PCR methodologies, which have the advantage of not requiring a single-stranded template. In addition, methods have been developed that do not require sub-cloning. Several issues must be considered when PCR-based site-directed mutagenesis is performed. First, in these methods it is desirable to reduce the number of PCR cycles to prevent expansion of undesired mutations introduced by the polymerase. Second, a selection must be employed in order to reduce the number of non-mutated parental molecules persisting in the reaction. Third, an extended-length PCR method is preferred in order to allow the use of a single PCR primer set. And fourth, because of the non-template-dependent terminal extension activity of some thermostable polymerases it is often necessary to incorporate an end-polishing step into the procedure prior to blunt-end ligation of the PCR-generated mutant product.

[0256] Mutations may also be introduced by directed evolution processes, such as phage-assisted continuous evolution (PACE) or phage-assisted noncontinuous evolution (PANCE). The term “phage-assisted continuous evolution (PACE),” as used herein, refers to continuous evolution that employs phage as viral vectors. The general concept of PACE technology has been described, for example, in International PCT Application, PCT/US2009/056194, filed Sep. 8, 2009, published as WO 2010/028347 on Mar. 11, 2010; International PCT Application, PCT/US2011/066747, filed Dec. 22, 2011, published as WO 2012/088381 on Jun. 28, 2012; U.S. application, U.S. Pat. No. 9,023,594, issued May 5, 2015, International PCT Application, PCT/US2015/012022, filed Jan. 20, 2015, published as WO 2015/134121 on Sep. 11, 2015, and International PCT Application, PCT/US2016/027795, filed Apr. 15, 2016, published as WO 2016/168631 on Oct. 20, 2016, the entire contents of each of which are incorporated herein by reference. Variant Cas9s may also be obtain by phage-assisted non-continuous evolution (PANCE),” which as used herein, refers to non-continuous evolution that employs phage as viral vectors. PANCE is a simplified technique for rapid in vivo directed evolution using serial flask transfers of evolving ‘selection phage’ (SP), which contain a gene of interest to be evolved, across fresh E. coli host cells, thereby allowing genes inside the host E. coli to be held constant while genes contained in the SP continuously evolve. Serial flask transfers have long served as a widely-accessible approach for laboratory evolution of microbes, and, more recently, analogous approaches have been developed for bacteriophage evolution. The PANCE system features lower stringency than the PACE system.

[0257] Any of the references noted above which relate to Cas9 or Cas9 equivalents are hereby incorporated by reference in their entireties, if not already stated so.

### III. Adenosine Deaminases

[0258] In some embodiments, the disclosure provides base editors that comprise one or more adenosine deaminase domains. In some aspects, any of the disclosed base editors are capable of deaminating adenosine in a nucleic acid sequence (e.g., DNA or RNA). As one example, any of the base editors provided herein may be base editors, (e.g., adenine base editors). Without wishing to be bound by any particular theory, dimerization of adenosine deaminases (e.g., in cis or in trans) may improve the ability (e.g., efficiency) of the base editor to modify a nucleic acid base, for example to deaminate adenine.

[0259] Exemplary, non-limiting, embodiments of adenosine deaminases are provided herein. In some embodiments, the adenosine deaminase domain of any of the disclosed base editors comprises a single adenosine deaminase, or a monomer. In some embodiments, the adenosine deaminase domain comprises 2, 3, 4 or 5 adenosine deaminases. In some embodiments, the adenosine deaminase domain comprises two adenosine deaminases, or a dimer. In some embodiments, the deaminase domain comprises a dimer of an engineered (or evolved) deaminase and a wild-type deaminase, such as a wild-type E. coli deaminase. It should be appreciated that the mutations provided herein (e.g., mutations in ecTadA) may be applied to adenosine deaminases in other adenosine base editors, for example those provided in International Publication No. WO 2018/027078, published Aug. 2, 2018; International Application No PCT/US2019/033848, filed May 23, 2019, which published as International Publication No. WO 2019/226593 on Nov. 28, 2019; U.S. Patent Publication No. 2018/0073012, published Mar. 15, 2018, which issued as U.S. Pat. No. 10,113,163, on Oct. 30, 2018; U.S. Patent Publication No. 2017/0121693, published May 4, 2017, which issued as U.S. Pat. No. 10,167,457 on Jan. 1, 2019; International Publication No. WO 2017/070633, published Apr. 27, 2017; U.S. Patent Publication No. 2015/0166980, published Jun. 18, 2015; U.S. Pat. No. 9,840,699, issued Dec. 12, 2017; and U.S. Pat. No. 10,077,453, issued Sep. 18, 2018, and U.S. Provisional Application No. 62/835,490, filed Apr. 17, 2019; all of which are incorporated herein by reference in their entireties.

[0260] In some embodiments, any of the adenosine deaminases provided herein are capable of deaminating adenine, e.g., deaminating adenine in a deoxyadenosine residue of DNA. The adenosine deaminase may be derived from any suitable organism (e.g., E. coli). In some embodiments, the adenosine deaminase is a naturally-occurring adenosine deaminase that includes one or more mutations corresponding to any of the mutations provided herein (e.g., mutations in ecTadA). One of skill in the art will be able to identify the corresponding residue in any homologous protein and in the respective encoding nucleic acid by methods well known in the art, e.g., by sequence alignment and determination of homologous residues. Accordingly, one of skill in the art would be able to generate mutations in any naturally-occurring adenosine deaminase (e.g., having homology to ecTadA) that corresponds to any of the mutations described herein, e.g., any of the mutations identified in ecTadA. In some embodiments, the adenosine deaminase is derived from a prokaryote. In some embodiments, the adenosine deaminase is from a bacterium. In some embodiments, the adenosine deaminase is from Escherichia coli, Staphylococcus aureus, Salmonella typhi, Shewanella putrefaciens, Haemophilus influenzae, Caulobacter crescentus, or Bacillus subtilis. In some embodiments, the adenosine deaminase is from E. coli.

[0261] In some embodiments, the adenosine deaminase may comprise one or more substitutions that include R26G, V69A, V88A, A109S, T111R, D119N, H122N, Y147D, F149Y, T166I, D167N relative to TadA7.10 (SEQ ID NO: 79), or a substitution at a corresponding amino acid in another adenosine deaminase. In some embodiments, the adenosine deaminase comprises T111R, D119N, and F149Y substitutions in TadA7.10 (SEQ ID NO: 79), or a corresponding mutation in another adenosine deaminase. In particular embodiments, the adenosine deaminase comprises T111R, D119N, and F149Y substitutions, and further comprises at least one substitution selected from R26C, V88A, A109S, H122N, T166I, and D167N, in TadA7.10 (SEQ ID NO: 79), or a corresponding mutation in another adenosine deaminase.

[0262] In some embodiments, the adenosine deaminase comprises A109S, T111R, D119N, H122N, F149Y, T166I, and D167N substitutions in TadA7.10 (SEQ ID NO: 79), or a corresponding mutation in another adenosine deaminase. In some embodiments, the adenosine deaminase comprises R26C, D108W, T111R, D119N, and F149Y substitutions in TadA7.10 (SEQ ID NO: 79), or a corresponding mutation in another adenosine deaminase. In some embodiments, the adenosine deaminase comprises V88A, D108W, T111R, D119N, and F149Y substitutions in TadA7.10 (SEQ ID NO: 79), or a corresponding mutation in another adenosine deaminase. In some embodiments, the adenosine deaminase further comprises a Y147D substitution in TadA7.10 (SEQ ID NO: 79), or a corresponding mutation in another adenosine deaminase.

[0263] In some embodiments, the adenosine deaminase comprises A109S, T111R, D119N, H122N, Y147D, F149Y, T166I and D167N substitutions in TadA7.10 (SEQ ID NO: 79), or a corresponding mutation in another adenosine deaminase. In some embodiments, the adenosine deaminase comprises TadA-8e. In some embodiments, the adenosine deaminase comprises A109S, T111R, D119N, H122N, Y147D, F149Y, T166I and D167N in TadA7.10 (SEQ ID NO: 79), or a corresponding mutation in another adenosine deaminase. In some embodiments, the adenosine deaminase further comprises at least one substitution selected from K20A, R21A, V82G, and V106W in TadA7.10 (SEQ ID NO: 79), or a corresponding mutation in another adenosine deaminase. In certain embodiments, the adenosine deaminase comprises V106W, A109S, T111R, D119N, H122N, Y147D, F149Y, T166I and D167N substitutions in TadA7.10 (SEQ ID NO: 79), or a corresponding mutation in another adenosine deaminase. In some embodiments, the adenosine deaminase comprises TadA-8e(V106W). It should be appreciated, however, that additional deaminases may similarly be aligned to identify homologous amino acid residues that may be mutated as provided herein.

[0264] It should be appreciated that any of the mutations provided herein (e.g., based on the ecTadA amino acid sequence of SEQ ID NO: 78) may be introduced into other adenosine deaminases, such as S. aureus TadA (saTadA), or other adenosine deaminases (e.g., bacterial adenosine deaminases), such as those sequences provided below. It would be apparent to the skilled artisan how to identify amino acid residues from other adenosine deaminases that are homologous to the mutated residues in ecTadA. Thus, any of the mutations identified in ecTadA may be made in other adenosine deaminases that have homologous amino acid residues. It should also be appreciated that any of the mutations provided herein may be made individually or in any combination in ecTadA or another adenosine deaminase.

[0265] Exemplary adenosine deaminase variants of the disclosure are described below. In certain embodiments, the adenosine deaminase domain comprises an adenosine deaminase that has a sequence with at least 80%, at least 85%, at least 90%, at least 95%, at least 98%, at least 99%, or at least 99.5% sequence identity to one of the following:

E. coli TadA
(SEQ ID NO: 78)
MSEVEFSHEYWMRHALTLAKRAWDEREVPVGAVLVHNNRVIGEGWNRPIG
RHDPTAHAEIMALRQGGLVMQNYRLIDATLYVTLEPCVMCAGAMIHSRIG
RVVFGARDAKTGAAGSLMDVLHHPGMNHRVEITEGILADECAALLSDFFR
MRRQEIKAQKKAQSSTD
E. coli TadA 7.10
(SEQ ID NO: 79)
MSEVEFSHEYWMRHALTLAKRARDEREVPVGAVLVLNNRVIGEGWNRAIG
LHDPTAHAEIMALRQGGLVMQNYRLIDATLYVTFEPCVMCAGAMIHSRIG
RVVFGVRNAKTGAAGSLMDVLHYPGMNHRVEITEGILADECAALLCYFFR
MPRQVFNAQKKAQSSTD
E. coli TadA* 7.10
(SEQ ID NO: 403)
SEVEFSHEYWMRHALTLAKRARDEREVPVGAVLVLNNRVIGEGWNRAIGL
HDPTAHAEIMALRQGGLVMQNYRLIDATLYVTFEPCVMCAGAMIHSRIGR
VVFGVRNAKTGAAGSLMDVLHYPGMNHRVEITEGILADECAALLCYFFRM
PRQVFNAQKKAQSSTD
ABE7.10 TadA* monomer
DNA sequence
(SEQ ID NO: 404)
TCTGAGGTGGAGTTTTCCCACGAGTACTGGATGAGACATGCCCTGACCCT
GGCCAAGAGGGCACGCGATGAGAGGGAGGTGCCTGTGGGAGCCGTGCTGG
TGCTGAACAATAGAGTGATCGGCGAGGGCTGGAACAGAGCCATCGGCCTG
CACGACCCAACAGCCCATGCCGAAATTATGGCCCTGAGACAGGGCGGCCT
GGTCATGCAGAACTACAGACTGATTGACGCCACCCTGTACGTGACATTCG
AGCCTTGCGTGATGTGCGCCGGCGCCATGATCCACTCTAGGATCGGCCGC
GTGGTGTTTGGCGTGAGGAACGCAAAAACCGGCGCCGCAGGCTCCCTGAT
GGACGTGCTGCACTACCCCGGCATGAATCACCGCGTCGAAATTACCGAGG
GAATCCTGGCAGATGAATGTGCCGCCCTGCTGTGCTATTTCTTTCGGATG
CCTAGACAGGTGTTCAATGCTCAGAAGAAGGCCCAGAGCTCCACCGAC
E. coli TadA 7.10 (V106W)
(SEQ ID NO: 80)
MSEVEFSHEYWMRHALTLAKRARDEREVPVGAVLVLNNRVIGEGWNRAIG
LHDPTAHAEIMALRQGGLVMQNYRLIDATLYVTFEPCVMCAGAMIHSRIG
RVVFGWRNAKTGAAGSLMDVLHYPGMNHRVEITEGILADECAALLCYFFR
MPRQVFNAQKKAQSSTD
Staphylococcus aureus TadA
(SEQ ID NO: 81)
MGSHMTNDIYFMTLAIEEAKKAAQLGEVPIGAIITKDDEVIARAHNLRET
LQQPTAHAEHIAIERAAKVLGSWRLEGCTLYVTLEPCVMCAGTIVMSRIP
RVVYGADDPKGGCSGSLMNLLQQSNFNHRAIVDKGVLKEACSTLLTTFFK
NLRANKKSTN
Bacillus subtilis TadA
(SEQ ID NO: 82)
MTQDELYMKEAIKEAKKAEEKGEVPIGAVLVINGEIIARAHNLRETEQRS
IAHAEMLVIDEACKALGTWRLEGATLYVTLEPCPMCAGAVVLSRVEKVVF
GAFDPKGGCSGTLMNLLQEERFNHQAEVVSGVLEEECGGMLSAFFRELRK
KKKAARKNLSE
Salmonella typhimurium TadA
(SEQ ID NO: 83)
MPPAFITGVTSLSDVELDHEYWMRHALTLAKRAWDEREVPVGAVLVHNHR
VIGEGWNRPIGRHDPTAHAEIMALRQGGLVLQNYRLLDTTLYVTLEPCVM
CAGAMVHSRIGRVVFGARDAKTGAAGSLIDVLHHPGMNHRVEIIEGVLRD
ECATLLSDFFRMRRQEIKALKKADRAEGAGPAV
Shewanella putrefaciens TadA
(SEQ ID NO: 84)
MDEYWMQVAMQMAEKAEAAGEVPVGAVLVKDGQQIATGYNLSISQHDPTA
HAEILCLRSAGKKLENYRLLDATLYITLEPCAMCAGAMVHSRIARVVYGA
RDEKTGAAGTVVNLLQHPAFNHQVEVTSGVLAEACSAQLSRFFKRRRDEK
KALKLAQRAQQGIE
Haemophilus influenzae F3031 TadA
(SEQ ID NO: 85)
MDAAKVRSEFDEKMMRYALELADKAEALGEIPVGAVLVDDARNIIGEGWN
LSIVQSDPTAHAEIIALRNGAKNIQNYRLLNSTLYVTLEPCTMCAGAILH
SRIKRLVFGASDYKTGAIGSRFHFFDDYKMNHTLEITSGVLAEECSQKLS
TFFQKRREEKKIEKALLKSLSDK
Caulobacter crescentus TadA
(SEQ ID NO: 86)
MRTDESEDQDHRMMRLALDAARAAAEAGETPVGAVILDPSTGEVIATAGN
GPIAAHDPTAHAEIAAMRAAAAKLGNYRLTDLTLVVTLEPCAMCAGAISH
ARIGRVVFGADDPKGGAVVHGPKFFAQPTCHWRPEVTGGVLADESADLLR
GFFRARRKAKI
Geobacter sulfurreducens Tad A
(SEQ ID NO: 87)
MSSLKKTPIRDDAYWMGKAIREAAKAAARDEVPIGAVIVRDGAVIGRGHN
LREGSNDPSAHAEMIAIRQAARRSANWRLTGATLYVTLEPCLMCMGAIIL
ARLERVVFGCYDPKGAAGSLYDLSADPRLNHQVRLSPGVCQEECGTMLSD
FFRDLRRRKKAKATPALFIDERKVPPEP

[0266] In some embodiments, the adenosine deaminase domain comprises an N-terminal truncated E. coli TadA. In certain embodiments, the adenosine deaminase comprises the amino acid sequence:

(SEQ ID NO: 88)
MSEVEFSHEYWMRHALTLAKRAWDEREVPVGAVLV
HNNRVIGEGWNRPIGRHDPTAHAEIMALRQGGLVM
QNYRLIDATLYVTLEPCVMCAGAMIHSRIGRVVFG
ARDAKTGAAGSLMDVLHHPGMNHRVEITEGILADE
CAALLSDFFRMRRQEIKAQKKAQSSTD.

[0267] In some embodiments, the TadA deaminase is a full-length E. coli TadA deaminase (ecTadA). For example, in certain embodiments, the adenosine deaminase domain comprises a deaminase that comprises the amino acid sequence:

(SEQ ID NO: 89)
MRRAFITGVFFLSEVEFSHEYWMRHALTLAKRAWD
EREVPVGAVLVHNNRVIGEGWNRPIGRHDPTAHAE
IMALRQGGLVMQNYRLIDATLYVTLEPCVMCAGAM
IHSRIGRVVFGARDAKTGAAGSLMDVLHHPGMNHR
VEITEGILADECAALLSDFFRMRRQEIKAQKKAQS
STD

ABE8 TadA* monomer
DNA sequence
(SEQ ID NO: 90)
TCTGAGGTGGAGTTTTCCCACGAGTACTGGATGAG
ACATGCCCTGACCCTGGCCAAGAGGGCACGGGATG
AGAGGGAGGTGCCTGTGGGAGCCGTGCTGGTGCTG
AACAATAGAGTGATCGGCGAGGGCTGGAACAGAGC
CATCGGCCTGCACGACCCAACAGCCCATGCCGAAA
TTATGGCCCTGAGACAGGGCGGCCTGGTCATGCAG
AACTACAGACTGATTGACGCCACCCTGTACGTGAC
ATTCGAGCCTTGCGTGATGTGCGCCGGCGCCATGA
TCCACTCTAGGATCGGCCGCGTGGTGTTTGGCGTG
AGGAACTCAAAAAGAGGCGCCGCAGGCTCCCTGAT
GAACGTGCTGAACTACCCCGGCATGAATCACCGCG
TCGAAATTACCGAGGGAATCCTGGCAGATGAATGT
GCCGCCCTGCTGTGCGATTTCTATCGGATGCCTAG
ACAGGTGTTCAATGCTCAGAAGAAGGCCCAGAGCT
CCATCAAC
ABE8 TadA* monomer
Amino Acid Sequence
(SEQ ID NO: 91)
SEVEFSHEYWMRHALTLAKRARDEREVPVGAVLVL
NNRVIGEGWNRAIGLHDPTAHAEIMALRQGGLVMQ
NYRLIDATLYVTFEPCVMCAGAMIHSRIGRVVFGV
RNSKRGAAGSLMNVLNYPGMNHRVEITEGILADEC
AALLCDFYRMPRQVFNAQKKAQSSIN

[0268] In other aspects, the disclosure provides adenine base editors with broadened target sequence compatibility. In general, native ecTadA deaminates the adenine in the sequence UAC (e.g., the target sequence) of the anticodon loop of tRNA^{Arg}. Without wishing to be bound by any particular theory, in order to expand the utility of ABEs comprising one or more ecTadA deaminases, such as any of the adenosine deaminases provided herein, the adenosine deaminase proteins were optimized to recognize a wide variety of target sequences within the protospacer sequence without compromising the editing efficiency of the adenosine nucleobase editor complex. In some embodiments, the target sequence is an A in the center of a 5′-NAN-3′ sequence, wherein N is T, C, G, or A. In some embodiments, the target sequence comprises 5′-TAC-3′. In some embodiments, the target sequence comprises 5′-GAA-3′.

[0269] Any two or more of the adenosine deaminases described herein may be connected to one another (e.g., by a linker) within an adenosine deaminase domain of the base editors provided herein. For instance, the base editors provided herein may contain only two adenosine deaminases. In some embodiments, the adenosine deaminases are the same. In some embodiments, the adenosine deaminases are any of the adenosine deaminases provided herein. In some embodiments, the adenosine deaminases are different. In some embodiments, the first adenosine deaminase is any of the adenosine deaminases provided herein, and the second adenosine is any of the adenosine deaminases provided herein, but is not identical to the first adenosine deaminase. In some embodiments, the base editor comprises two adenosine deaminases (e.g., a first adenosine deaminase and a second adenosine deaminase). In some embodiments, the base editor comprises a first adenosine deaminase and a second adenosine deaminase. In some embodiments, the first adenosine deaminase is N-terminal to the second adenosine deaminase in the base editor. In some embodiments, the first adenosine deaminase is C-terminal to the second adenosine deaminase in the base editor. In some embodiments, the first adenosine deaminase and the second deaminase are fused directly or via a linker.

[0270] In some embodiments, the adenosine deaminase domain comprises an adenosine deaminase that comprises an amino acid sequence that is at least 60%, at least 65%, at least 70%, at least 75%, at least 80%, at least 85%, at least 90%, at least 95%, at least 96%, at least 97%, at least 98%, at least 99%, or at least 99.5% identical to any one of the amino acid sequences set forth in any one of SEQ ID NOs: 78-91, or to any of the adenosine deaminases provided herein. In certain embodiments, the adenosine deaminase comprises an amino acid sequence that is at least 80%, at least 85%, at least 90%, at least 95%, at least 96%, at least 97%, at least 98%, at least 99%, or at least 99.5% identical to the amino acid sequence of TadA7.10 (SEQ ID NO: 403). It should be appreciated that adenosine deaminases provided herein may include one or more mutations (e.g., any of the mutations provided herein). The disclosure provides adenosine deaminases with a certain percent identity plus any of the mutations or combinations thereof described herein. In some embodiments, the adenosine deaminase comprises an amino acid sequence that has 1, 2, 3, 4, 5, 6, 7, 8, 9, 10, 11, 12, 13, 14, 15, 16, 17, 18, 19, 20, 21, 22, 21, 24, 25, 26, 27, 28, 29, 30, 31, 32, 33, 34, 35, 36, 37, 38, 39, 40, 41, 42, 43, 44, 45, 46, 47, 48, 49, 50, or more mutations compared to any one of the amino acid sequences set forth in SEQ ID NOs: 78-91, and 403-404 (e.g., TadA7.10), or any of the adenosine deaminases provided herein. In some embodiments, the adenosine deaminase comprises an amino acid sequence that has at least 5, at least 10, at least 15, at least 20, at least 25, at least 30, at least 35, at least 40, at least 45, at least 50, at least 60, at least 70, at least 80, at least 90, at least 100, at least 110, at least 120, at least 130, at least 140, at least 150, at least 160, or at least 170 identical contiguous amino acid residues as compared to any one of the amino acid sequences set forth in SEQ ID NOs: 78-91, and 403-404 (e.g., TadA7.10), or any of the adenosine deaminases provided herein.

[0271] In some embodiments, the adenosine deaminase comprises TadA 7.10, whose sequence is set forth as SEQ ID NO: 79, or a variant thereof. TadA7.10 comprises the following mutations in wild-type ecTadA: W23R, H36L, P48A, R51L, L84F, A106V, D108N, H123Y, S146C, D147Y, R152P, E155V, I156F, and K157N.

[0272] In some embodiments, the adenosine deaminase is at least 50%, at least 55%, at least 60%, at least 65%, at least 70%, at least 75% at least 80%, at least 85%, at least 90%, at least 95%, at least 96%, at least 97%, at least 98%, at least 99%, or at least 99.5% identical to a naturally-occurring adenosine deaminase, e.g., E. coli TadA 7.10 of SEQ ID NO: 79. In some embodiments, the adenosine deaminase is from a bacterium, such as, E. coli, S. aureus, S. typhi, S. putrefaciens, H. influenzae, or C. crescentus. In some embodiments, the adenosine deaminase is a TadA deaminase. In some embodiments, the TadA deaminase is an E. coli TadA deaminase (ecTadA). In some embodiments, the TadA deaminase is a truncated E. coli TadA deaminase. For example, the truncated ecTadA may be missing one or more N-terminal or C-terminal amino acids relative to a full-length ecTadA. In some embodiments, the truncated ecTadA may be missing 1, 2, 3, 4, 5, 6, 7, 8, 9, 10, 11, 12, 13, 14, 15, 6, 17, 18, 19, or 20 N-terminal amino acid residues relative to the full length ecTadA. In some embodiments, the truncated ecTadA may be missing 1, 2, 3, 4, 5, 6, 7, 8, 9, 10, 11, 12, 13, 14, 15, 6, 17, 18, 19, or 20 C-terminal amino acid residues relative to the full length ecTadA. In some embodiments, the ecTadA deaminase does not comprise an N-terminal methionine.

[0273] In some embodiments, the TadA 7.10 of SEQ ID NO: 79 comprises an N-terminal methionine. It should be appreciated that the amino acid numbering scheme relating to the mutations in TadA 7.10 may be based on the TadA sequence of SEQ ID NO: 78, which contains an N-terminal methionine.

[0274] In some embodiments, the adenosine deaminase comprises a D108X mutation in ecTadA SEQ ID NO: 89, or a corresponding mutation in another adenosine deaminase, where X indicates any amino acid other than the corresponding amino acid in the wild-type adenosine deaminase. In some embodiments, the adenosine deaminase comprises a D108G, D108N, D108V, D108A, or D108Y mutation in ecTadA SEQ ID NO: 89, or a corresponding mutation in another adenosine deaminase. In some embodiments, the adenosine deaminase comprises a D108N mutation in ecTadA SEQ ID NO: 89, or a corresponding mutation in another adenosine deaminase. It should be appreciated, however, that additional deaminases may similarly be aligned to identify homologous amino acid residues that can be mutated as provided herein.

[0275] In some embodiments, the adenosine deaminase comprises an A106X mutation in ecTadA SEQ ID NO: 78, or a corresponding mutation in another adenosine deaminase, where X indicates any amino acid other than the corresponding amino acid in the wild-type adenosine deaminase. In some embodiments, the adenosine deaminase comprises an A106V mutation in ecTadA SEQ ID NO: 78, or a corresponding mutation in another adenosine deaminase.

[0276] In some embodiments, the adenosine deaminase comprises a E155X mutation in ecTadA SEQ ID NO: 78, or a corresponding mutation in another adenosine deaminase, where the presence of X indicates any amino acid other than the corresponding amino acid in the wild-type adenosine deaminase. In some embodiments, the adenosine deaminase comprises a E155D, E155G, or E155V mutation in ecTadA SEQ ID NO: 78, or a corresponding mutation in another adenosine deaminase. In some embodiments, the adenosine deaminase comprises a E155V mutation in ecTadA SEQ ID NO: 78, or a corresponding mutation in another adenosine deaminase).

[0277] In some embodiments, the adenosine deaminase comprises a D147X mutation in ecTadA SEQ ID NO: 78, or a corresponding mutation in another adenosine deaminase, where the presence of X indicates any amino acid other than the corresponding amino acid in the wild-type adenosine deaminase. In some embodiments, the adenosine deaminase comprises a D147Y mutation in ecTadA SEQ ID NO: 78, or a corresponding mutation in another adenosine deaminase.

[0278] In some embodiments, an adenosine deaminase comprises the following group of mutations (groups of mutations are separated by a “;”) in ecTadA SEQ ID NO: 78, or corresponding mutations in another adenosine deaminase: D108N and A106V; D108N and E155V; D108N and D147Y; A106V and E155V; A106V and D147Y; E155V and D147Y; D108N, A106V, and E55V; D108N, A106V, and D147Y; D108N, E55V, and D147Y; A106V, E55V, and D147Y; and D108N, A106V, E55V, and D147Y. It should be appreciated, however, that any combination of corresponding mutations provided herein may be made in an adenosine deaminase (e.g., ecTadA). In some embodiments, an adenosine deaminase comprises one or more of the mutations provided herein, which identifies individual mutations and combinations of mutations made in ecTadA. In some embodiments, an adenosine deaminase comprises any mutation or combination of mutations provided herein.

[0279] In some embodiments, the adenosine deaminase comprises an L84X mutation in ecTadA SEQ ID NO: 78, or a corresponding mutation in another adenosine deaminase, where X indicates any amino acid other than the corresponding amino acid in the wild-type adenosine deaminase. In some embodiments, the adenosine deaminase comprises an L84F mutation in ecTadA SEQ ID NO: 78, or a corresponding mutation in another adenosine deaminase.

[0280] In some embodiments, the adenosine deaminase comprises an H123X mutation in ecTadA SEQ ID NO: 78, or a corresponding mutation in another adenosine deaminase, where X indicates any amino acid other than the corresponding amino acid in the wild-type adenosine deaminase. In some embodiments, the adenosine deaminase comprises an H123Y mutation in ecTadA SEQ ID NO: 78, or a corresponding mutation in another adenosine deaminase.

[0281] In some embodiments, the adenosine deaminase comprises an I156X mutation in ecTadA SEQ ID NO: 78, or a corresponding mutation in another adenosine deaminase, where X indicates any amino acid other than the corresponding amino acid in the wild-type adenosine deaminase. In some embodiments, the adenosine deaminase comprises an I156F mutation in ecTadA SEQ ID NO: 78, or a corresponding mutation in another adenosine deaminase.

[0282] In some embodiments, the adenosine deaminase comprises one, two, three, four, five, six, or seven mutations selected from the group consisting of L84X, A106X, D108X, H123X, D147X, E155X, and I156X in ecTadA SEQ ID NO: 78, or a corresponding mutation or mutations in another adenosine deaminase, where X indicates the presence of any amino acid other than the corresponding amino acid in the wild-type adenosine deaminase.

[0283] In some embodiments, the adenosine deaminase comprises one, two, three, four, five, six, or seven mutations selected from the group consisting of L84F, A106V, D108N, H123Y, D147Y, E155V, and I156F in ecTadA SEQ ID NO: 78, or a corresponding mutation or mutations in another adenosine deaminase. In some embodiments, the adenosine deaminase comprises one, two, three, four, five, or six mutations selected from the group consisting of S2A, I49F, A106V, D108N, D147Y, and E155V in ecTadA SEQ ID NO: 78, or a corresponding mutation or mutations in another adenosine deaminase. In some embodiments, the adenosine deaminase comprises one, two, three, four, or five, mutations selected from the group consisting of H8Y, A106T, D108N, N127S, and K160S in ecTadA SEQ ID NO: 78, or a corresponding mutation or mutations in another adenosine deaminase.

[0284] In some embodiments, the adenosine deaminase comprises an A142X mutation in ecTadA SEQ ID NO: 78, or a corresponding mutation in another adenosine deaminase, where X indicates any amino acid other than the corresponding amino acid in the wild-type adenosine deaminase. In some embodiments, the adenosine deaminase comprises an A142N, A142D, A142G, mutation in ecTadA SEQ ID NO: 78, or a corresponding mutation in another adenosine deaminase. In some embodiments, the adenosine deaminase comprises an A142N mutation in ecTadA SEQ ID NO: 78, or a corresponding mutation in another adenosine deaminase.

[0285] In some embodiments, the adenosine deaminase comprises an H36X mutation in ecTadA SEQ ID NO: 78, or a corresponding mutation in another adenosine deaminase, where X indicates any amino acid other than the corresponding amino acid in the wild-type adenosine deaminase. In some embodiments, the adenosine deaminase comprises an H36L mutation in ecTadA SEQ ID NO: 78, or a corresponding mutation in another adenosine deaminase.

[0286] In some embodiments, the adenosine deaminase comprises an N37X mutation in ecTadA SEQ ID NO: 78, or a corresponding mutation in another adenosine deaminase, where X indicates any amino acid other than the corresponding amino acid in the wild-type adenosine deaminase. In some embodiments, the adenosine deaminase comprises an N37T, or N37S mutation in ecTadA SEQ ID NO: 78, or a corresponding mutation in another adenosine deaminase. In some embodiments, the adenosine deaminase comprises a N37S mutation in ecTadA SEQ ID NO: 78, or a corresponding mutation in another adenosine deaminase.

[0287] In some embodiments, the adenosine deaminase comprises an P48X mutation in ecTadA SEQ ID NO: 78, or a corresponding mutation in another adenosine deaminase, where X indicates any amino acid other than the corresponding amino acid in the wild-type adenosine deaminase. In some embodiments, the adenosine deaminase comprises an P48T, P48S, P48A, or P48L mutation in ecTadA SEQ ID NO: 78, or a corresponding mutation in another adenosine deaminase. In some embodiments, the adenosine deaminase comprises a P48T mutation in ecTadA SEQ ID NO: 78, or a corresponding mutation in another adenosine deaminase. In some embodiments, the adenosine deaminase comprises a P48S mutation in ecTadA SEQ ID NO: 78, or a corresponding mutation in another adenosine deaminase. In some embodiments, the adenosine deaminase comprises a P48A mutation in ecTadA SEQ ID NO: 78, or a corresponding mutation in another adenosine deaminase.

[0288] In some embodiments, the adenosine deaminase comprises an R51X mutation in ecTadA SEQ ID NO: 78, or a corresponding mutation in another adenosine deaminase, where X indicates any amino acid other than the corresponding amino acid in the wild-type adenosine deaminase. In some embodiments, the adenosine deaminase comprises an R51H, or R51L mutation in ecTadA SEQ ID NO: 78, or a corresponding mutation in another adenosine deaminase. In some embodiments, the adenosine deaminase comprises a R51L mutation in ecTadA SEQ ID NO: 78, or a corresponding mutation in another adenosine deaminase.

[0289] In some embodiments, the adenosine deaminase comprises an S146X mutation in ecTadA SEQ ID NO: 78, or a corresponding mutation in another adenosine deaminase, where X indicates any amino acid other than the corresponding amino acid in the wild-type adenosine deaminase. In some embodiments, the adenosine deaminase comprises an S146R, or S146C mutation in ecTadA SEQ ID NO: 78, or a corresponding mutation in another adenosine deaminase. In some embodiments, the adenosine deaminase comprises a S146C mutation in ecTadA SEQ ID NO: 78, or a corresponding mutation in another adenosine deaminase.

[0290] In some embodiments, the adenosine deaminase comprises an K157X mutation in ecTadA SEQ ID NO: 78, or a corresponding mutation in another adenosine deaminase, where X indicates any amino acid other than the corresponding amino acid in the wild-type adenosine deaminase. In some embodiments, the adenosine deaminase comprises a K157N mutation in ecTadA SEQ ID NO: 78, or a corresponding mutation in another adenosine deaminase.

[0291] In some embodiments, the adenosine deaminase comprises an W23X mutation in ecTadA SEQ ID NO: 78, or a corresponding mutation in another adenosine deaminase, where X indicates any amino acid other than the corresponding amino acid in the wild-type adenosine deaminase. In some embodiments, the adenosine deaminase comprises a W23R, or W23L mutation in ecTadA SEQ ID NO: 78, or a corresponding mutation in another adenosine deaminase. In some embodiments, the adenosine deaminase comprises a W23R mutation in ecTadA SEQ ID NO: 78, or a corresponding mutation in another adenosine deaminase. In some embodiments, the adenosine deaminase comprises a W23L mutation in ecTadA SEQ ID NO: 78, or a corresponding mutation in another adenosine deaminase.

[0292] In some embodiments, the adenosine deaminase comprises an R152X mutation in ecTadA SEQ ID NO: 78, or a corresponding mutation in another adenosine deaminase, where X indicates any amino acid other than the corresponding amino acid in the wild-type adenosine deaminase. In some embodiments, the adenosine deaminase comprises a R152P, or R52H mutation in ecTadA SEQ ID NO: 78, or a corresponding mutation in another adenosine deaminase. In some embodiments, the adenosine deaminase comprises a R152P mutation in ecTadA SEQ ID NO: 78, or a corresponding mutation in another adenosine deaminase. In some embodiments, the adenosine deaminase comprises a R152H mutation in ecTadA SEQ ID NO: 78, or a corresponding mutation in another adenosine deaminase.

[0293] In some embodiments, the adenosine deaminase comprises an R26X mutation in ecTadA SEQ ID NO: 78, or a corresponding mutation in another adenosine deaminase, where X indicates any amino acid other than the corresponding amino acid in the wild-type adenosine deaminase. In some embodiments, the adenosine deaminase comprises a R26G mutation in ecTadA SEQ ID NO: 78, or a corresponding mutation in another adenosine deaminase.

[0294] In some embodiments, the adenosine deaminase comprises an I49X mutation in ecTadA SEQ ID NO: 78, or a corresponding mutation in another adenosine deaminase, where X indicates any amino acid other than the corresponding amino acid in the wild-type adenosine deaminase. In some embodiments, the adenosine deaminase comprises a I49V mutation in ecTadA SEQ ID NO: 78, or a corresponding mutation in another adenosine deaminase.

[0295] In some embodiments, the adenosine deaminase comprises an N72X mutation in ecTadA SEQ ID NO: 78, or a corresponding mutation in another adenosine deaminase, where X indicates any amino acid other than the corresponding amino acid in the wild-type adenosine deaminase. In some embodiments, the adenosine deaminase comprises a N72D mutation in ecTadA SEQ ID NO: 78, or a corresponding mutation in another adenosine deaminase.

[0296] In some embodiments, the adenosine deaminase comprises an S97X mutation in ecTadA SEQ ID NO: 78, or a corresponding mutation in another adenosine deaminase, where X indicates any amino acid other than the corresponding amino acid in the wild-type adenosine deaminase. In some embodiments, the adenosine deaminase comprises a S97C mutation in ecTadA SEQ ID NO: 78, or a corresponding mutation in another adenosine deaminase.

[0297] In some embodiments, the adenosine deaminase comprises an G125X mutation in ecTadA SEQ ID NO: 78, or a corresponding mutation in another adenosine deaminase, where X indicates any amino acid other than the corresponding amino acid in the wild-type adenosine deaminase. In some embodiments, the adenosine deaminase comprises a G125A mutation in ecTadA SEQ ID NO: 78, or a corresponding mutation in another adenosine deaminase.

[0298] In some embodiments, the adenosine deaminase comprises an K161X mutation in ecTadA SEQ ID NO: 78, or a corresponding mutation in another adenosine deaminase, where X indicates any amino acid other than the corresponding amino acid in the wild-type adenosine deaminase. In some embodiments, the adenosine deaminase comprises a K161T mutation in ecTadA SEQ ID NO: 78, or a corresponding mutation in another adenosine deaminase.

[0299] In some embodiments, the adenosine deaminase comprises one or more of a W23X, H36X, N37X, P48X, I49X, R51X, N72X, L84X, S97X, A106X, D108X, H123X, G125X, A142X, S146X, D147X, R152X, E155X, I156X, K157X, and/or K161X mutation in ecTadA SEQ ID NO: 78, or one or more corresponding mutations in another adenosine deaminase, where the presence of X indicates any amino acid other than the corresponding amino acid in the wild-type adenosine deaminase. In some embodiments, the adenosine deaminase comprises one or more of W23L, W23R, H36L, P48S, P48A, R51L, L84F, A106V, D108N, H123Y, A142N, S146C, D147Y, R152P, E155V, I156F, and/or K157N mutation in ecTadA SEQ ID NO: 78, or one or more corresponding mutations in another adenosine deaminase. In some embodiments, the adenosine deaminase comprises one or more of the mutations provided herein corresponding to ecTadA SEQ ID NO: 78, or one or more corresponding mutations in another adenosine deaminase.

[0300] In some embodiments, the adenosine deaminase comprises or consists of one or two mutations selected from A106X and D108X in ecTadA SEQ ID NO: 78, or a corresponding mutation or mutations in another adenosine deaminase, where X indicates the presence of any amino acid other than the corresponding amino acid in the wild-type adenosine deaminase. In some embodiments, the adenosine deaminase comprises or consists of one or two mutations selected from A106V and D108N in ecTadA SEQ ID NO: 78, or a corresponding mutation or mutations in another adenosine deaminase.

[0301] In some embodiments, the adenosine deaminase comprises or consists of one, two, three, or four mutations selected from A106X, D108X, D147X, and E155X in ecTadA SEQ ID NO: 78, or a corresponding mutation or mutations in another adenosine deaminase, where X indicates the presence of any amino acid other than the corresponding amino acid in the wild-type adenosine deaminase. In some embodiments, the adenosine deaminase comprises or consists of one, two, three, or four mutations selected from A106V, D108N, D147Y, and E155V in ecTadA SEQ ID NO: 78, or a corresponding mutation or mutations in another adenosine deaminase. In some embodiments, the adenosine deaminase comprises or consists of a A106V, D108N, D147Y, and E155V mutation in ecTadA SEQ ID NO: 78, or corresponding mutations in another adenosine deaminase.

[0302] In some embodiments, the adenosine deaminase comprises or consists of one, two, three, four, five, six, or seven mutations selected from L84X, A106X, D108X, H123X, D147X, E155X, and I156X in ecTadA SEQ ID NO: 78, or a corresponding mutation or mutations in another adenosine deaminase, where X indicates the presence of any amino acid other than the corresponding amino acid in the wild-type adenosine deaminase. In some embodiments, the adenosine deaminase comprises or consists of one, two, three, four, five, six, or seven mutations selected from L84F, A106V, D108N, H123Y, D147Y, E155V, and I156F in ecTadA SEQ ID NO: 78, or a corresponding mutation or mutations in another adenosine deaminase. In some embodiments, the adenosine deaminase comprises or consists of a L84F, A106V, D108N, H123Y, D147Y, E155V, and I156F mutation in ecTadA SEQ ID NO: 78, or corresponding mutations in another adenosine deaminase.

[0303] In some embodiments, the adenosine deaminase comprises or consists of one, two, three, four, five, six, seven, eight, nine, ten, or eleven mutations selected from H36X, R51X, L84X, A106X, D108X, H123X, S146X, D147X, E155X, I156X, and K157X in ecTadA SEQ ID NO: 78, or a corresponding mutation or mutations in another adenosine deaminase, where X indicates the presence of any amino acid other than the corresponding amino acid in the wild-type adenosine deaminase. In some embodiments, the adenosine deaminase comprises or consists of one, two, three, four, five, six, seven, eight, nine, ten, or eleven mutations selected from H36L, R51L, L84F, A106V, D108N, H123Y, S146C, D147Y, E155V, I156F, and K157N in ecTadA SEQ ID NO: 78, or a corresponding mutation or mutations in another adenosine deaminase. In some embodiments, the adenosine deaminase comprises or consists of a H36L, R51L, L84F, A106V, D108N, H123Y, S146C, D147Y, E155V, I156F, and K157N mutation in ecTadA SEQ ID NO: 78, or corresponding mutations in another adenosine deaminase.

[0304] In some embodiments, the adenosine deaminase comprises or consists of one, two, three, four, five, six, seven, eight, nine, ten, eleven, or twelve mutations selected from H36X, P48X, R51X, L84X, A106X, D108X, H123X, S146X, D147X, E155X, I156X, and K157X in ecTadA SEQ ID NO: 78, or a corresponding mutation or mutations in another adenosine deaminase, where X indicates the presence of any amino acid other than the corresponding amino acid in the wild-type adenosine deaminase. In some embodiments, the adenosine deaminase comprises or consists of one, two, three, four, five, six, seven, eight, nine, ten, eleven, or twelve mutations selected from H36L, P48S, R51L, L84F, A106V, D108N, H123Y, S146C, D147Y, E155V, I156F, and K157N in ecTadA SEQ ID NO: 78, or a corresponding mutation or mutations in another adenosine deaminase. In some embodiments, the adenosine deaminase comprises or consists of a H36L, P48S, R51L, L84F, A106V, D108N, H123Y, S146C, D147Y, E155V, I156F, and K157N mutation in ecTadA SEQ ID NO: 78, or corresponding mutations in another adenosine deaminase.

[0305] In some embodiments, the adenosine deaminase comprises or consists of one, two, three, four, five, six, seven, eight, nine, ten, eleven, twelve, or thirteen mutations selected from H36X, P48X, R51X, L84X, A106X, D108X, H123X, A142X, S146X, D147X, E155X, I156X, and K157X in ecTadA SEQ ID NO: 78, or a corresponding mutation or mutations in another adenosine deaminase, where X indicates the presence of any amino acid other than the corresponding amino acid in the wild-type adenosine deaminase. In some embodiments, the adenosine deaminase comprises or consists of one, two, three, four, five, six, seven, eight, nine, ten, eleven, twelve, or thirteen mutations selected from H36L, P48S, R51L, L84F, A106V, D108N, H123Y, A142N, S146C, D147Y, E155V, I156F, and K157N in ecTadA SEQ ID NO: 78, or a corresponding mutation or mutations in another adenosine deaminase. In some embodiments, the adenosine deaminase comprises or consists of a H36L, P48S, R51L, L84F, A106V, D108N, H123Y, A142N, S146C, D147Y, E155V, I156F, and K157N mutation in ecTadA SEQ ID NO: 78, or corresponding mutations in another adenosine deaminase.

[0306] In some embodiments, the adenosine deaminase comprises or consists of one, two, three, four, five, six, seven, eight, nine, ten, eleven, twelve, thirteen, or fourteen mutations selected from W23X, H36X, P48X, R51X, L84X, A106X, D108X, H123X, A142X, S146X, D147X, E155X, I156X, and K157X in ecTadA SEQ ID NO: 78, or a corresponding mutation or mutations in another adenosine deaminase, where X indicates the presence of any amino acid other than the corresponding amino acid in the wild-type adenosine deaminase. In some embodiments, the adenosine deaminase comprises or consists of one, two, three, four, five, six, seven, eight, nine, ten, eleven, twelve, thirteen, or fourteen mutations selected from W23L, H36L, P48A, R51L, L84F, A106V, D108N, H123Y, A142N, S146C, D147Y, E155V, I156F, and K157N in ecTadA SEQ ID NO: 78 or a corresponding mutation or mutations in another adenosine deaminase. In some embodiments, the adenosine deaminase comprises or consists of a W23L, H36L, P48A, R51L, L84F, A106V, D108N, H123Y, A142N, S146C, D147Y, E155V, I156F, and K157N mutation in ecTadA SEQ ID NO: 78, or corresponding mutations in another adenosine deaminase.

[0307] In some embodiments, the adenosine deaminase comprises or consists of one, two, three, four, five, six, seven, eight, nine, ten, eleven, twelve, thirteen, or fourteen mutations selected from W23X, H36X, P48X, R51X, L84X, A106X, D108X, H123X, S146X, D147X, R152X, E155X, I156X, and K157X in ecTadA SEQ ID NO: 78, or a corresponding mutation or mutations in another adenosine deaminase, where X indicates the presence of any amino acid other than the corresponding amino acid in the wild-type adenosine deaminase. In some embodiments, the adenosine deaminase comprises or consists of one, two, three, four, five, six, seven, eight, nine, ten, eleven, twelve, thirteen, or fourteen mutations selected from W23R, H36L, P48A, R51L, L84F, A106V, D108N, H123Y, S146C, D147Y, R152P, E155V, I156F, and K157N in ecTadA SEQ ID NO: 78, or a corresponding mutation or mutations in another adenosine deaminase. In some embodiments, the adenosine deaminase comprises or consists of a W23R, H36L, P48A, R51L, L84F, A106V, D108N, H123Y, S146C, D147Y, R152P, E155V, I156F, and K157N mutation in ecTadA SEQ ID NO: 78, or corresponding mutations in another adenosine deaminase.

[0308] In some embodiments, the adenosine deaminase comprises or consists of one, two, three, four, five, six, seven, eight, nine, ten, eleven, twelve, thirteen, fourteen, or fifteen mutations selected from W23X, H36X, P48X, R51X, L84X, A106X, D108X, H123X, A142X, S146X, D147X, R152X, E155X, I156X, and K157X in ecTadA SEQ ID NO: 78, or a corresponding mutation or mutations in another adenosine deaminase, where X indicates the presence of any amino acid other than the corresponding amino acid in the wild-type adenosine deaminase. In some embodiments, the adenosine deaminase comprises or consists of one, two, three, four, five, six, seven, eight, nine, ten, eleven, twelve, thirteen, fourteen, or fifteen mutations selected from W23L, H36L, P48A, R51L, L84F, A106V, D108N, H123Y, A142N, S146C, D147Y, R152P, E155V, I156F, and K157N in ecTadA SEQ ID NO: 78, or a corresponding mutation or mutations in another adenosine deaminase. In some embodiments, the adenosine deaminase comprises or consists of a W23L, H36L, P48A, R51L, L84F, A106V, D108N, H123Y, A142N, S146C, D147Y, R152P, E155V, I156F, and K157N mutation in ecTadA SEQ ID NO: 78, or corresponding mutations in another adenosine deaminase.

[0309] In some embodiments, the adenosine deaminase comprises one or more of the mutations provided herein corresponding to ecTadA SEQ ID NO: 78, or one or more of the corresponding mutations in another deaminase. In some embodiments, the adenosine deaminase comprises or consists of a variant of ecTadA SEQ ID NO: 78 provided herein, or the corresponding variant in another adenosine deaminase.

[0310] It should be appreciated that the adenosine deaminase (e.g., a first or second adenosine deaminase) may comprise one or more of the mutations provided in any of the adenosine deaminases (e.g., ecTadA adenosine deaminases) provided herein. In some embodiments, the adenosine deaminase comprises the combination of mutations of any of the adenosine deaminases (e.g., ecTadA adenosine deaminases) provided herein. For example, the adenosine deaminase may comprise the mutations W23R, H36L, P48A, R51L, L84F, A106V, D108N, H123Y, S146C, D147Y, R152P, E155V, I156F, and K157N (relative to ecTadA SEQ ID NO: 78), which corresponds to ABE7.10 provided herein. In some embodiments, the adenosine deaminase may comprise the mutations H36L, R51L, L84F, A106V, D108N, H123Y, S146C, D147Y, E155V, I156F, and K157N (relative to ecTadA SEQ ID NO: 78).

[0311] In some embodiments, the adenosine deaminase comprises any of the following combination of mutations relative to ecTadA SEQ ID NO: 78, where each mutation of a combination is separated by a “_” and each combination of mutations is between parentheses: (A106V_D108N), (R107C_D108N), (H8Y_D108N_S127S_D147Y_Q154H), (H8Y_R24W_D108N_N127S_D147Y_E155V), (D108N_D147Y_E155V), (H8Y_D108N_S127S), (H8Y_D108N_N127S_D147Y_Q154H), (A106V_D108N_D147Y_E155V), (D108Q_D147Y_E155V), (D108M_D147Y_E155V), (D108L_D147Y_E155V), (D108K_D147Y_E155V), (D108I_D147Y_E155V), (D108F_D147Y_E155V), (A106V_D108N_D147Y), (A106V_D108M_D147Y_E155V), (E59A_A106V_D108N_D147Y_E155V), (E59A cat dead_A106V_D108N_D147Y_E155V), (L84F_A106V_D108N_H123Y_D147Y_E155V_I156Y), (L84F_A106V_D108N_H123Y_D147Y_E155V_I156F), (D103A_D014N), (G22P_D103A_D104N), (G22P_D103A_D104N_S138A), (D103A_D104N_S138A), (R26G_L84F_A106V_R107H_D108N_H123Y_A142N_A143D_D147Y_E155V_I156F), (E25G_R26G_L84F_A106V_R107H_D108N_H123Y_A142N_A143D_D147Y_E155V_I156F), (E25D_R26G_L84F_A106V_R107K_D108N_H123Y_A142N_A143G_D147Y_E155V_I156F), (R26Q_L84F_A106V_D108N_H123Y_A142N_D147Y_E155V_I156F), (E25M_R26G_L84F_A106V_R107P_D108N_H123Y_A142N_A143D_D147Y_E155V_I156F), (R26C_L84F_A106V_R107H_D108N_H123Y_A142N_D147Y_E155V_I156F), (L84F_A106V_D108N_H123Y_A142N_A143L_D147Y_E155V_I156F), (R26G_L84F_A106V_D108N_H123Y_A142N_D147Y_E155V_I156F), (E25A_R26G_L84F_A106V_R107N_D108N_H123Y_A142N_A143E_D147Y_E155V_I156F), (R26G_L84F_A106V_R107H_D108N_H123Y_A142N_A143D_D147Y_E155V_I156F), (A106V_D108N_A142N_D147Y_E155V), (R26G_A106V_D108N_A142N_D147Y_E155V), (E25D_R26G_A106V_R107K_D108N_A142N_A143G_D147Y_E155V), (R26G_A106V_D108N_R107H_A142N_A143D_D147Y_E155V), (E25D_R26G_A106V_D108N_A142N_D147Y_E155V), (A106V_R107K_D108N_A142N_D147Y_E155V), (A106V_D108N_A142N_A143G_D147Y_E155V), (A106V_D108N_A142N_A143L_D147Y_E155V), (H36L_R51L_L84F_A106V_D108N_H123Y_S146C_D147Y_E155V_I156F_K157N), (H36L_P48S_R51L_L84F_A106V_D108N_H123Y_S146C_D147Y_E155V_I156F_K157N), (H36L_P48S_R51L_L84F_A106V_D108N_H123Y_A142N_S146C_D147Y_E155V_I156F_K157N), (W23L_H36L_P48A_R51L_L84F_A106V_D108N_H123Y_A142N_S146C_D147Y_E155V_I156F_K157N), (W23L_H36L_P48A_R51L_L84F_A106V_D108N_H123Y_A142N_S146C_D147Y_R152P_E155V_I156F_K157N), (N37T_P48T_M70L_L84F_A106V_D108N_H123Y_D147Y_I49V_E155V_I156F), (N37S_L84F_A106V_D108N_H123Y_D147Y_E155V_I156F_K161T), (H36L_L84F_A106V_D108N_H123Y_D147Y_Q154H_E155V_I156F), (N72S_L84F_A106V_D108N_H123Y_S146R_D147Y_E155V_I156F), (H36L_P48L_L84F_A106V_D108N_H123Y_E134G_D147Y_E155V_I156F), (H36L_L84F_A106V_D108N_H123Y_D147Y_E155V_I156F_K157N), (H36L_L84F_A106V_D108N_H123Y_S146C_D147Y_E155V_I156F), (L84F_A106V_D108N_H123Y_S146R_D147Y_E155V_I156F_K161T), (N37S_R51H_D77G_L84F_A106V_D108N_H123Y_D147Y_E155V_I156F), (R51L_L84F_A106V_D108N_H123Y_D147Y_E155V_I156F_K157N), (D24G_Q71R_L84F_H96L_A106V_D108N_H123Y_D147Y_E155V_I156F_K160E), (H36L_G67V_L84F_A106V_D108N_H123Y_S146T_D147Y_E155V_I156F), (Q71L_L84F_A106V_D108N_H123Y_L137M_A143E_D147Y_E155V_I156F), (E25G_L84F_A106V_D108N_H123Y_D147Y_E155V_I156F_Q159L), (L84F_A91T_F104I_A106V_D108N_H123Y_D147Y_E155V_I156F), (N72D_L84F_A106V_D108N_H123Y_G125A_D147Y_E155V_I156F), (P48S_L84F_S97C_A106V_D108N_H123Y_D147Y_E155V_I156F), (W23G_L84F_A106V_D108N_H123Y_D147Y_E155V_I156F), (D24G_P48L_Q71R_L84F_A106V_D108N_H123Y_D147Y_E155V_I156F_Q159L), (L84F_A106V_D108N_H123Y_A142N_D147Y_E155V_I156F), (H36L_R51L_L84F_A106V_D108N_H123Y_A142N_S146C_D147Y_E155V_I156F_K157N), (N37S_L84F_A106V_D108N_H123Y_A142N_D147Y_E155V_I156F_K161T), (L84F_A106V_D108N_D147Y_E155V_I156F), (R51L_L84F_A106V_D108N_H123Y_S146C_D147Y_E155V_I156F_K157N_K161T), (L84F_A106V_D108N_H123Y_S146C_D147Y_E155V_I156F_K161T), (L84F_A106V_D108N_H123Y_S146C_D147Y_E155V_I156F_K157N_K160E_K161T), (L84F_A106V_D108N_H123Y_S146C_D147Y_E155V_I156F_K157N_K160E), (R74Q L84F_A106V_D108N_H123Y_D147Y_E155V_I156F), (R74A_L84F_A106V_D108N_H123Y_D147Y_E155V_I156F), (L84F_A106V_D108N_H123Y_D147Y_E155V_I156F), (R74Q_L84F_A106V_D108N_H123Y_D147Y_E155V_I156F), (L84F_R98Q_A106V_D108N_H123Y_D147Y_E155V_I156F), (L84F_A106V_D108N_H123Y_R129Q_D147Y_E155V_I156F), (P48S_L84F_A106V_D108N_H123Y_A142N_D147Y_E155V_I156F), (P48S_A142N), (P48T_I49V_L84F_A106V_D108N_H123Y_A142N_D147Y_E155V_I156F_L157N), (P48T_I49V_A142N), (H36L_P48S_R51L_L84F_A106V_D108N_H123Y_S146C_D147Y_E155V_I156F_K157N), (H36L_P48S_R51L_L84F_A106V_D108N_H123Y_S146C_A142N_D147Y_E155V_I156F_K157N), (H36L_P48T_I49V_R51L_L84F_A106V_D108N_H123Y_S146C_D147Y_E155V_I156F_K157N), (H36L_P48T_I49V_R51L_L84F_A106V_D108N_H123Y_A142N_S146C_D147Y_E155V_I156F_K157N), (H36L_P48A_R51L_L84F_A106V_D108N_H123Y_S146C_D147Y_E155V_I156F_K157N), (H36L_P48A_R51L_L84F_A106V_D108N_H123Y_A142N_S146C_D147Y_E155V_I156F_K157N), (H36L_P48A_R51L_L84F_A106V_D108N_H123Y_S146C_A142N_D147Y_E155V_I156F_K157N), (W23L_H36L_P48A_R51L_L84F_A106V_D108N_H123Y_S146C_D147Y_E155V_I156F_K157N), (W23R_H36L_P48A_R51L_L84F_A106V_D108N_H123Y_S146C_D147Y_E155V_I156F_K157N), (W23L_H36L_P48A_R51L_L84F_A106V_D108N_H123Y_S146R_D147Y_E155V_I156F_K161T), (H36L_P48A_R51L_L84F_A106V_D108N_H123Y_S146C_D147Y_R152H_E155V_I156F_K157N), (H36L_P48A_R51L_L84F_A106V_D108N_H123Y_S146C_D147Y_R152P_E155V_I156F_K157N), (W23L_H36L_P48A_R51L_L84F_A106V_D108N_H123Y_S146C_D147Y_R152P_E155V_I156F_K157N), (W23L_H36L_P48A_R51L_L84F_A106V_D108N_H123Y_A142A_S146C_D147Y_E155V_I156F_K157N), (W23L_H36L_P48A_R51L_L84F_A106V_D108N_H123Y_A142A_S146C_D147Y_R152P_E155V_I156F_K157N), (W23L_H36L_P48A_R51L_L84F_A106V_D108N_H123Y_S146R_D147Y_E155V_I156F_K161T), (W23R_H36L_P48A_R51L_L84F_A106V_D108N_H123Y_S146C_D147Y_R152P_E155V_I156F_K157N), (H36L_P48A_R51L_L84F_A106V_D108N_H123Y_A142N_S146C_D147Y_R152P_E155V_I156F_K157N).

### IV. Cytidine Deaminases

[0312] In some embodiments, the disclosure provides base editors that comprise one or more cytidine deaminase domains. In some aspects, any of the disclosed base editors are capable of deaminating cytidine in a nucleic acid sequence (e.g., genomic DNA). As one example, any of the base editors provided herein may be base editors, (e.g., cytidine base editors).

[0313] In some embodiments, the cytidine deaminase is an apolipoprotein B mRNA-editing complex (APOBEC) family deaminase. In some embodiments, the cytidine deaminase is an APOBEC1 deaminase, an APOBEC2 deaminase, an APOBEC3A deaminase, an APOBEC3B deaminase, an APOBEC3C deaminase, an APOBEC3D deaminase, an APOBEC3F deaminase, an APOBEC3G deaminase, an APOBEC3H deaminase, or an APOBEC4 deaminase. In some embodiments, the cytidine deaminase is an activation-induced deaminase (AID). In some embodiments, the deaminase is a Lamprey CDA1 (pmCDA1) deaminase. In some embodiments, the cytidine deaminase is from a human, chimpanzee, gorilla, monkey, cow, dog, rat, or mouse. In some embodiments, the deaminase is from a human. In some embodiments the deaminase is from a rat. In some embodiments, the cytidine deaminase is a human APOBEC1 deaminase. In some embodiments, the cytidine deaminase is pmCDA1. In some embodiments, the deaminase is human APOBEC3G. In some embodiments, the deaminase is a human APOBEC3G variant. In some embodiments, the deaminase is at least 80%, at least 85%, at least 90%, at least 92%, at least 95%, at least 96%, at least 97%, at least 98%, at least 99%, or at least 99.5% identical to any one of the APOBEC amino acid sequences set forth herein.

[0314] Some exemplary suitable cytidine deaminases domains that can be fused to Cas9 domains according to aspects of this disclosure are provided below. It should be understood that the disclosure also embraces other cytidine deaminases comprising an amino acid sequence having at least 80%, at least 85%, at least 90%, at least 95%, at least 98%, at least 99%, or at least 99.5% sequence identity to one of the following exemplary cytidine deaminases:

Human AID:
(SEQ ID NO: 92)
[sequence omitted]
Mouse AID:
(SEQ ID NO: 93)
MDSLLMKQKKFLYHFKNVRWAKGRHETYLCYVVKRRDSATSCSLDFGHLR
NKSGCHVELLFLRYISDWDLDPGRCYRVTWFTSWSPCYDCARHVAEFLRW
NPNLSLRIFTARLYFCEDRKAEPEGLRRLHRAGVQIGIMTFKDYFYCWNT
FVENRERTFKAWEGLHENSVRLTRQLRRILLPLYEVDDLRDAFRMLGF
Dog AID:
(SEQ ID NO: 94)
MDSLLMKQRKFLYHFKNVRWAKGRHETYLCYVVKRRDSATSFSLDFGHLR
NKSGCHVELLFLRYISDWDLDPGRCYRVTWFTSWSPCYDCARHVADFLRG
YPNLSLRIFAARLYFCEDRKAEPEGLRRLHRAGVQIAIMTFKDYFYCWNT
FVENREKTFKAWEGLHENSVRLSRQLRRILLPLYEVDDLRDAFRTLGL
Bovine AID:
(SEQ ID NO: 95)
MDSLLKKQRQFLYQFKNVRWAKGRHETYLCYVVKRRDSPTSFSLDFGHLR
NKAGCHVELLFLRYISDWDLDPGRCYRVTWFTSWSPCYDCARHVADFLRG
YPNLSLRIFTARLYFCDKERKAEPEGLRRLHRAGVQIAIMTFKDYFYCWN
TFVENHERTFKAWEGLHENSVRLSRQLRRILLPLYEVDDLRDAFRTLGL
Rat AID:
(SEQ ID NO: 96)
MAVGSKPKAALVGPHWERERIWCFLCSTGLGTQQTGQTSRWLRPAATQDP
VSPPRSLLMKQRKFLYHFKNVRWAKGRHETYLCYVVKRRDSATSFSLDFG
YLRNKSGCHVELLFLRYISDWDLDPGRCYRVTWFTSWSPCYDCARHVADF
LRGNPNLSLRIFTARLTGWGALPAGLMSPARPSDYFYCWNTFVENHERTF
KAWEGLHENSVRLSRRLRRILLPLYEVDDLRDAFRTLGL
Mouse APOBEC-3:
(SEQ ID NO: 97)
MGPFCLGCSHRKCYSPIRNLISQETFKFHFKNLGYAKGRKDTFLCYEVTR
KDCDSPVSLHHGVFKNKDNIHAEICFLYWFHDKVLKVLSPREEFKITWYM
SWSPCFECAEQIVRFLATHHNLSLDIFSSRLYNVQDPETQQNLCRLVQEG
AQVAAMDLYEFKKCWKKFVDNGGRRFRPWKRLLTNFRYQDSKLQEILRPC
YIPVPSSSSSTLSNICLTKGLPETRFCVEGRRMDPLSEEEFYSQFYNQRV
KHLCYYHRMKPYLCYQLEQFNGQAPLKGCLLSEKGKQHAEILFLDKIRSM
ELSQVTITCYLTWSPCPNCAWQLAAFKRDRPDLILHIYTSRLYFHWKRPF
QKGLCSLWQSGILVDVMDLPQFTDCWTNFVNPKRPFWPWKGLEIISRRTQ
RRLRRIKESWGLQDLVNDFGNLQLGPPMS
Rat APOBEC-3:
(SEQ ID NO: 98)
MGPFCLGCSHRKCYSPIRNLISQETFKFHFKNLRYAIDRKDTFLCYEVTR
KDCDSPVSLHHGVFKNKDNIHAEICFLYWFHDKVLKVLSPREEFKITWYM
SWSPCFECAEQVLRFLATHHNLSLDIFSSRLYNIRDPENQQNLCRLVQEG
AQVAAMDLYEFKKCWKKFVDNGGRRFRPWKKLLTNFRYQDSKLQEILRPC
YIPVPSSSSSTLSNICLTKGLPETRFCVERRRVHLLSEEEFYSQFYNQRV
KHLCYYHGVKPYLCYQLEQFNGQAPLKGCLLSEKGKQHAEILFLDKIRSM
ELSQVIITCYLTWSPCPNCAWQLAAFKRDRPDLILHIYTSRLYFHWKRPF
QKGLCSLWQSGILVDVMDLPQFTDCWTNFVNPKRPFWPWKGLEIISRRTQ
RRLHRIKESWGLQDLVNDFGNLQLGPPMS
Rhesus macaque APOBEC-3G:
(SEQ ID NO: 99)
MVEPMDPRTFVSNFNNRPILSGLNTVWLCCEVKTKDPSGPPLDAKIFQGK
VYSKAKYHPEMRFLRWFHKWRQLHHDQEYKVTWYVSWSPCTRCANSVATF
LAKDPKVTLTIFVARLYYFWKPDYQQALRILCQKRGGPHATMKIMNYNEF
QDCWNKFVDGRGKPFKPRNNLPKHYTLLQATLGELLRHLMDPGTFTSNFN
NKPWVSGQHETYLCYKVERLHNDTWVPLNQHRGFLRNQAPNIHGFPKGRH
AELCFLDLIPFWKLDGQQYRVTCFTSWSPCFSCAQEMAKFISNNEHVSLC
IFAARIYDDQGRYQEGLRALHRDGAKIAMMNYSEFEYCWDTFVDRQGRPF
QPWDGLDEHSQALSGRLRAI
Chimpanzee APOBEC-3G:
(SEQ ID NO: 100)
MKPHFRNPVERMYQDTFSDNFYNRPILSHRNTVWLCYEVKTKGPSRPPLD
AKIFRGQVYSKLKYHPEMRFFHWFSKWRKLHRDQEYEVTWYISWSPCTKC
TRDVATFLAEDPKVTLTIFVARLYYFWDPDYQEALRSLCQKRDGPRATMK
IMNYDEFQHCWSKFVYSQRELFEPWNNLPKYYILLHIMLGEILRHSMDPP
TFTSNFNNELWVRGRHETYLCYEVERLHNDTWVLLNQRRGFLCNQAPHKH
GFLEGRHAELCFLDVIPFWKLDLHQDYRVTCFTSWSPCFSCAQEMAKFIS
NNKHVSLCIFAARIYDDQGRCQEGLRTLAKAGAKISIMTYSEFKHCWDTF
VDHQGCPFQPWDGLEEHSQALSGRLRAILQNQGN
Green monkey APOBEC-3G:
(SEQ ID NO: 101)
MNPQIRNMVEQMEPDIFVYYFNNRPILSGRNTVWLCYEVKTKDPSGPPLD
ANIFQGKLYPEAKDHPEMKFLHWFRKWRQLHRDQEYEVTWYVSWSPCTRC
ANSVATFLAEDPKVTLTIFVARLYYFWKPDYQQALRILCQERGGPHATMK
IMNYNEFQHCWNEFVDGQGKPFKPRKNLPKHYTLLHATLGELLRHVMDPG
TFTSNFNNKPWVSGQRETYLCYKVERSHNDTWVLLNQHRGFLRNQAPDRH
GFPKGRHAELCFLDLIPFWKLDDQQYRVTCFTSWSPCFSCAQKMAKFISN
NKHVSLCIFAARIYDDQGRCQEGLRTLHRDGAKIAVMNYSEFEYCWDTFV
DRQGRPFQPWDGLDEHSQALSGRLRAI
Human APOBEC-3G:
(SEQ ID NO: 102)
MKPHFRNTVERMYRDTFSYNFYNRPILSRRNTVWLCYEVKTKGPSRPPLD
AKIFRGQVYSELKYHPEMRFFHWFSKWRKLHRDQEYEVTWYISWSPCTKC
TRDMATFLAEDPKVTLTIFVARLYYFWDPDYQEALRSLCQKRDGPRATMK
IMNYDEFQHCWSKFVYSQRELFEPWNNLPKYYILLHIMLGEILRHSMDPP
TFTFNFNNEPWVRGRHETYLCYEVERMHNDTWVLLNQRRGFLCNQAPHKH
GFLEGRHAELCFLDVIPFWKLDLDQDYRVTCFTSWSPCFSCAQEMAKFIS
KNKHVSLCIFTARIYDDQGRCQEGLRTLAEAGAKISIMTYSEFKHCWDTF
VDHQGCPFQPWDGLDEHSQDLSGRLRAILQNQEN
Human APOBEC-3F:
(SEQ ID NO: 103)
MKPHFRNTVERMYRDTFSYNFYNRPILSRRNTVWLCYEVKTKGPSRPRLD
AKIFRGQVYSQPEHHAEMCFLSWFCGNQLPAYKCFQITWFVSWTPCPDCV
AKLAEFLAEHPNVTLTISAARLYYYWERDYRRALCRLSQAGARVKIMDDE
EFAYCWENFVYSEGQPFMPWYKFDDNYAFLHRTLKEILRNPMEAMYPHIF
YFHFKNLRKAYGRNESWLCFTMEVVKHHSPVSWKRGVFRNQVDPETHCHA
ERCFLSWFCDDILSPNTNYEVTWYTSWSPCPECAGEVAEFLARHSNVNLT
IFTARLYYFWDTDYQEGLRSLSQEGASVEIMGYKDFKYCWENFVYNDDEP
FKPWKGLKYNFLFLDSKLQEILE
Human APOBEC-3B:
(SEQ ID NO: 104)
MNPQIRNPMERMYRDTFYDNFENEPILYGRSYTWLCYEVKIKRGRSNLLW
DTGVFRGQVYFKPQYHAEMCFLSWFCGNQLPAYKCFQITWFVSWTPCPDC
VAKLAEFLSEHPNVTLTISAARLYYYWERDYRRALCRLSQAGARVTIMDY
EEFAYCWENFVYNEGQQFMPWYKFDENYAFLHRTLKEILRYLMDPDTFTF
NFNNDPLVLRRRQTYLCYEVERLDNGTWVLMDQHMGFLCNEAKNLLCGFY
GRHAELRFLDLVPSLQLDPAQIYRVTWFISWSPCFSWGCAGEVRAFLQEN
THVRLRIFAARIYDYDPLYKEALQMLRDAGAQVSIMTYDEFEYCWDTFVY
RQGCPFQPWDGLEEHSQALSGRLRAILQNQGN
Rat APOBEC-3B:
(SEQ ID NO: 105)
MQPQGLGPNAGMGPVCLGCSHRRPYSPIRNPLKKLYQQTFYFHFKNVRYA
WGRKNNFLCYEVNGMDCALPVPLRQGVFRKQGHIHAELCFIYWFHDKVLR
VLSPMEEFKVTWYMSWSPCSKCAEQVARFLAAHRNLSLAIFSSRLYYYLR
NPNYQQKLCRLIQEGVHVAAMDLPEFKKCWNKFVDNDGQPFRPWMRLRIN
FSFYDCKLQEIFSRMNLLREDVFYLQFNNSHRVKPVQNRYYRRKSYLCYQ
LERANGQEPLKGYLLYKKGEQHVEILFLEKMRSMELSQVRITCYLTWSPC
PNCARQLAAFKKDHPDLILRIYTSRLYFYWRKKFQKGLCTLWRSGIHVDV
MDLPQFADCWTNFVNPQRPFRPWNELEKNSWRIQRRLRRIKESWGL
Bovine APOBEC-3B:
(SEQ ID NO: 106)
DGWEVAFRSGTVLKAGVLGVSMTEGWAGSGHPGQGACVWTPGTRNTMNLL
REVLFKQQFGNQPRVPAPYYRRKTYLCYQLKQRNDLTLDRGCFRNKKQRH
AEIRFIDKINSLDLNPSQSYKIICYITWSPCPNCANELVNFITRNNHLKL
EIFASRLYFHWIKSFKMGLQDLQNAGISVAVMTHTEFEDCWEQFVDNQSR
PFQPWDKLEQYSASIRRRLQRILTAPI
Chimpanzee APOBEC-3B:
(SEQ ID NO: 107)
MNPQIRNPMEWMYQRTFYYNFENEPILYGRSYTWLCYEVKIRRGHSNLLW
DTGVFRGQMYSQPEHHAEMCFLSWFCGNQLSAYKCFQITWFVSWTPCPDC
VAKLAKFLAEHPNVTLTISAARLYYYWERDYRRALCRLSQAGARVKIMDD
EEFAYCWENFVYNEGQPFMPWYKFDDNYAFLHRTLKEIIRHLMDPDTFTF
NFNNDPLVLRRHQTYLCYEVERLDNGTWVLMDQHMGFLCNEAKNLLCGFY
GRHAELRFLDLVPSLQLDPAQIYRVTWFISWSPCFSWGCAGQVRAFLQEN
THVRLRIFAARIYDYDPLYKEALQMLRDAGAQVSIMTYDEFEYCWDTFVY
RQGCPFQPWDGLEEHSQALSGRLRAILQVRASSLCMVPHRPPPPPQSPGP
CLPLCSEPPLGSLLPTGRPAPSLPFLLTASFSFPPPASLPPLPSLSLSPG
HLPVPSFHSLTSCSIQPPCSSRIRETEGWASVSKEGRDLG
Human APOBEC-3C:
(SEQ ID NO: 108)
MNPQIRNPMKAMYPGTFYFQFKNLWEANDRNETWLCFTVEGIKRRSVVSW
KTGVFRNQVDSETHCHAERCFLSWFCDDILSPNTKYQVTWYTSWSPCPDC
AGEVAEFLARHSNVNLTIFTARLYYFQYPCYQEGLRSLSQEGVAVEIMDY
EDFKYCWENFVYNDNEPFKPWKGLKTNFRLLKRRLRESLQ
Gorilla APOBEC3C:
(SEQ ID NO: 109)
MNPQIRNPMKAMYPGTFYFQFKNLWEANDRNETWLCFTVEGIKRRSVVSW
KTGVFRNQVDSETHCHAERCFLSWFCDDILSPNTNYQVTWYTSWSPCPEC
AGEVAEFLARHSNVNLTIFTARLYYFQDTDYQEGLRSLSQEGVAVKIMDY
KDFKYCWENFVYNDDEPFKPWKGLKYNFRFLKRRLQEILE
Human APOBEC-3A:
(SEQ ID NO: 110)
MEASPASGPRHLMDPHIFTSNFNNGIGRHKTYLCYEVERLDNGTSVKMDQ
HRGFLHNQAKNLLCGFYGRHAELRFLDLVPSLQLDPAQIYRVTWFISWSP
CFSWGCAGEVRAFLQENTHVRLRIFAARIYDYDPLYKEALQMLRDAGAQV
SIMTYDEFKHCWDTFVDHQGCPFQPWDGLDEHSQALSGRLRAILQNQGN
Rhesus macaque APOBEC-3A:
(SEQ ID NO: 111)
MDGSPASRPRHLMDPNTFTFNFNNDLSVRGRHQTYLCYEVERLDNGTWVP
MDERRGFLCNKAKNVPCGDYGCHVELRFLCEVPSWQLDPAQTYRVTWFIS
WSPCFRRGCAGQVRVFLQENKHVRLRIFAARIYDYDPLYQEALRTLRDAG
AQVSIMTYEEFKHCWDTFVDRQGRPFQPWDGLDEHSQALSGRLRAILQNQ
GN
Bovine APOBEC-3A:
(SEQ ID NO: 112)
MDEYTFTENFNNQGWPSKTYLCYEMERLDGDATIPLDEYKGFVRNKGLDQ
PEKPCHAELYFLGKIHSWNLDRNQHYRLTCFISWSPCYDCAQKLTTFLKE
NHHISLHILASRIYTHNRFGCHQSGLCELQAAGARITIMTFEDFKHCWET
FVDHKGKPFQPWEGLNVKSQALCTELQAILKTQQN
Human APOBEC-3H:
(SEQ ID NO: 113)
MALLTAETFRLQFNNKRRLRRPYYPRKALLCYQLTPQNGSTPTRGYFENK
KKCHAEICFINEIKSMGLDETQCYQVTCYLTWSPCSSCAWELVDFIKAHD
HLNLGIFASRLYYHWCKPQQKGLRLLCGSQVPVEVMGFPKFADCWENFVD
HEKPLSFNPYKMLEELDKNSRAIKRRLERIKIPGVRAQGRYMDILCDAEV
Rhesus macaque APOBEC-3H:
(SEQ ID NO: 114)
MALLTAKTFSLQFNNKRRVNKPYYPRKALLCYQLTPQNGSTPTRGHLKNK
KKDHAEIRFINKIKSMGLDETQCYQVTCYLTWSPCPSCAGELVDFIKAHR
HLNLRIFASRLYYHWRPNYQEGLLLLCGSQVPVEVMGLPEFTDCWENFVD
HKEPPSFNPSEKLEELDKNSQAIKRRLERIKSRSVDVLENGLRSLQLGPV
TPSSSIRNSR
Human APOBEC-3D:
(SEQ ID NO: 115)
MNPQIRNPMERMYRDTFYDNFENEPILYGRSYTWLCYEVKIKRGRSNLLW
DTGVFRGPVLPKRQSNHRQEVYFRFENHAEMCFLSWFCGNRLPANRRFQI
TWFVSWNPCLPCVVKVTKFLAEHPNVTLTISAARLYYYRDRDWRWVLLRL
HKAGARVKIMDYEDFAYCWENFVCNEGQPFMPWYKFDDNYASLHRTLKEI
LRNPMEAMYPHIFYFHFKNLLKACGRNESWLCFTMEVTKHHSAVFRKRGV
FRNQVDPETHCHAERCFLSWFCDDILSPNTNYEVTWYTSWSPCPECAGEV
AEFLARHSNVNLTIFTARLCYFWDTDYQEGLCSLSQEGASVKIMGYKDFV
SCWKNFVYSDDEPFKPWKGLQTNFRLLKRRLREILQ
Human APOBEC-1:
(SEQ ID NO: 116)
MTSEKGPSTGDPTLRRRIEPWEFDVFYDPRELRKEACLLYEIKWGMSRKI
WRSSGKNTTNHVEVNFIKKFTSERDFHPSMSCSITWFLSWSPCWECSQAI
REFLSRHPGVTLVIYVARLFWHMDQQNRQGLRDLVNSGVTIQIMRASEYY
HCWRNFVNYPPGDEAHWPQYPPLWMMLYALELHCIILSLPPCLKISRRWQ
NHLTFFRLHLQNCHYQTIPPHILLATGLIHPSVAWR
Mouse APOBEC-1:
(SEQ ID NO: 117)
MSSETGPVAVDPTLRRRIEPHEFEVFFDPRELRKETCLLYEINWGGRHSV
WRHTSQNTSNHVEVNFLEKFTTERYFRPNTRCSITWFLSWSPCGECSRAI
TEFLSRHPYVTLFIYIARLYHHTDQRNRQGLRDLISSGVTIQIMTEQEYC
YCWRNFVNYPPSNEAYWPRYPHLWVKLYVLELYCIILGLPPCLKILRRKQ
PQLTFFTITLQTCHYQRIPPHLLWATGLK
Rat APOBEC-1:
(SEQ ID NO: 118)
[sequence omitted]
Human APOBEC-2:
(SEQ ID NO: 119)
MAQKEEAAVATEAASQNGEDLENLDDPEKLKELIELPPFEIVTGERLPAN
FFKFQFRNVEYSSGRNKTFLCYVVEAQGKGGQVQASRGYLEDEHAAAHAE
EAFFNTILPAFDPALRYNVTWYVSSSPCAACADRIIKTLSKTKNLRLLIL
VGRLFMWEEPEIQAALKKLKEAGCKLRIMKPQDFEYVWQNFVEQEEGESK
AFQPWEDIQENFLYYEEKLADILK
Mouse APOBEC-2:
(SEQ ID NO: 120)
MAQKEEAAEAAAPASQNGDDLENLEDPEKLKELIDLPPFEIVTGVRLPVN
FFKFQFRNVEYSSGRNKTFLCYVVEVQSKGGQAQATQGYLEDEHAGAHAE
EAFFNTILPAFDPALKYNVTWYVSSSPCAACADRILKTLSKTKNLRLLIL
VSRLFMWEEPEVQAALKKLKEAGCKLRIMKPQDFEYIWQNFVEQEEGESK
AFEPWEDIQENFLYYEEKLADILK
Rat APOBEC-2:
(SEQ ID NO: 121)
MAQKEEAAEAAAPASQNGDDLENLEDPEKLKELIDLPPFEIVTGVRLPVN
FFKFQFRNVEYSSGRNKTFLCYVVEAQSKGGQVQATQGYLEDEHAGAHAE
EAFFNTILPAFDPALKYNVTWYVSSSPCAACADRILKTLSKTKNLRLLIL
VSRLFMWEEPEVQAALKKLKEAGCKLRIMKPQDFEYLWQNFVEQEEGESK
AFEPWEDIQENFLYYEEKLADILK
Bovine APOBEC-2:
(SEQ ID NO: 122)
MAQKEEAAAAAEPASQNGEEVENLEDPEKLKELIELPPFEIVTGERLPAH
YFKFQFRNVEYSSGRNKTFLCYVVEAQSKGGQVQASRGYLEDEHATNHAE
EAFFNSIMPTFDPALRYMVTWYVSSSPCAACADRIVKTLNKTKNLRLLIL
VGRLFMWEEPEIQAALRKLKEAGCRLRIMKPQDFEYIWQNFVEQEEGESK
AFEPWEDIQENFLYYEEKLADILK
Petromyzon marinus CDA1 (pmCDA1):
(SEQ ID NO: 123)
MTDAEYVRIHEKLDIYTFKKQFFNNKKSVSHRCYVLFELKRRGERRACFW
GYAVNKPQSGTERGIHAEIFSIRKVEEYLRDNPGQFTINWYSSWSPCADC
AEKILEWYNQELRGNGHTLKIWACKLYYEKNARNQIGLWNLRDNGVGLNV
MVSEHYQCCRKIFIQSSHNQLNENRWLEKTLKRAEKRRSELSIMIQVKIL
HTTKSPAV
Human APOBEC3G D316R D317R:
(SEQ ID NO: 124)
MKPHFRNTVERMYRDTFSYNFYNRPILSRRNTVWLCYEVKTKGPSRPPLD
AKIFRGQVYSELKYHPEMRFFHWFSKWRKLHRDQEYEVTWYISWSPCTKC
TRDMATFLAEDPKVTLTIFVARLYYFWDPDYQEALRSLCQKRDGPRATMK
IMNYDEFQHCWSKFVYSQRELFEPWNNLPKYYILLHIMLGEILRHSMDPP
TFTFNFNNEPWVRGRHETYLCYEVERMHNDTWVLLNQRRGFLCNQAPHKH
GFLEGRHAELCFLDVIPFWKLDLDQDYRVTCFTSWSPCFSCAQEMAKFIS
KNKHVSLCIFTARIYRRQGRCQEGLRTLAEAGAKISIMTYSEFKHCWDTF
VDHQGCPFQPWDGLDEHSQDLSGRLRAILQNQEN
Human APOBEC3G chain A:
(SEQ ID NO: 125)
MDPPTFTFNFNNEPWVRGRHETYLCYEVERMHNDTWVLLNQRRGFLCNQA
PHKHGFLEGRHAELCFLDVIPFWKLDLDQDYRVTCFTSWSPCFSCAQEMA
KFISKNKHVSLCIFTARIYDDQGRCQEGLRTLAEAGAKISIMTYSEFKHC
WDTFVDHQGCPFQPWDGLDEHSQDLSGRLRAILQ
Human APOBEC3G chain A D120R_D121R:
(SEQ ID NO: 126)
MDPPTFTFNFNNEPWVRGRHETYLCYEVERMHNDTWVLLNQRRGFLCNQA
PHKHGFLEGRHAELCFLDVIPFWKLDLDQDYRVTCFTSWSPCFSCAQEMA
KFISKNKHVSLCIFTARIYRRQGRCQEGLRTLAEAGAKISIMTYSEFKHC
WDTFVDHQGCPFQPWDGLDEHSQDLSGRLRAILQ

[0315] Any of the aforementioned DNA effector domains may be subjected to a continuous evolution process (e.g., PACE) or may be otherwise further evolved using a mutagenesis methodology known in the art.

[0316] In some embodiments, the cytidine deaminase is an apolipoprotein B mRNA-editing complex (APOBEC) family deaminase. In some embodiments, the deaminase is an APOBEC1 deaminase. In some embodiments, the deaminase is an APOBEC2 deaminase. In some embodiments, the deaminase is an APOBEC3 deaminase. In some embodiments, the deaminase is an APOBEC3A deaminase. In some embodiments, the deaminase is an APOBEC3B deaminase. In some embodiments, the deaminase is an APOBEC3C deaminase. In some embodiments, the deaminase is an APOBEC3D deaminase. In some embodiments, the deaminase is an APOBEC3E deaminase. In some embodiments, the deaminase is an APOBEC3F deaminase. In some embodiments, the deaminase is an APOBEC3G deaminase. In some embodiments, the deaminase is an APOBEC3H deaminase. In some embodiments, the deaminase is an APOBEC4 deaminase. In some embodiments, the deaminase is an activation-induced deaminase (AID). In some embodiments, the deaminase is a vertebrate deaminase. In some embodiments, the deaminase is an invertebrate deaminase. In some embodiments, the deaminase is a human, chimpanzee, gorilla, monkey, cow, dog, rat, or mouse deaminase. In some embodiments, the deaminase is a human deaminase. In some embodiments, the deaminase is a rat deaminase, e.g., rAPOBEC1.

[0317] Some aspects of the disclosure are based on the recognition that modulating the deaminase domain catalytic activity of any of the fusion proteins provided herein, for example by making point mutations in the deaminase domain, affect the processivity of the fusion proteins (e.g., base editors). For example, mutations that reduce, but do not eliminate, the catalytic activity of a deaminase domain within a base editing fusion protein can make it less likely that the deaminase domain will catalyze the deamination of a residue adjacent to a target residue, thereby narrowing the deamination window. The ability to narrow the deamination window may prevent unwanted deamination of residues adjacent of specific target residues, which may decrease or prevent off-target effects.

[0318] In some embodiments, any of the fusion proteins provided herein comprise a deaminase domain (e.g., a cytidine deaminase domain) that has reduced catalytic deaminase activity. In some embodiments, any of the fusion proteins provided herein comprise a deaminase domain (e.g., a cytidine deaminase domain) that has a reduced catalytic deaminase activity as compared to an appropriate control. For example, the appropriate control may be the deaminase activity of the deaminase prior to introducing one or more mutations into the deaminase. In other embodiments, the appropriate control may be a wild-type deaminase. In some embodiments, the appropriate control is a wild-type apolipoprotein B mRNA-editing complex (APOBEC) family deaminase. In some embodiments, the appropriate control is an APOBEC1 deaminase, an APOBEC2 deaminase, an APOBEC3A deaminase, an APOBEC3B deaminase, an APOBEC3C deaminase, an APOBEC3D deaminase, an APOBEC3F deaminase, an APOBEC3G deaminase, or an APOBEC3H deaminase. In some embodiments, the appropriate control is an activation induced deaminase (AID). In some embodiments, the appropriate control is a cytidine deaminase 1 from Petromyzon marinus (pmCDA1). In some embodiments, the deaminase domain may be a deaminase domain that has at least 1%, at least 5%, at least 15%, at least 20%, at least 25%, at least 30%, at least 40%, at least 50%, at least 60%, at least 70%, at least 80%, at least 90%, or at least 95% less catalytic deaminase activity as compared to an appropriate control.

[0319] The apolipoprotein B mRNA-editing complex (APOBEC) family of cytidine deaminase enzymes encompasses eleven proteins that serve to initiate mutagenesis in a controlled and beneficial manner. One family member, activation-induced cytidine deaminase (AID), is responsible for the maturation of antibodies by converting cytosines in ssDNA to uracils in a transcription-dependent, strand-biased fashion. The apolipoprotein B editing complex 3 (APOBEC3) enzyme provides protection to human cells against a certain HIV-1 strain via the deamination of cytosines in reverse-transcribed viral ssDNA. These proteins all require a Zn2+-coordinating motif (His-X-Glu-X23-26-Pro-Cys-X2-4-Cys; (SEQ ID NO: 402) and bound water molecule for catalytic activity. The Glu residue acts to activate the water molecule to a zinc hydroxide for nucleophilic attack in the deamination reaction. Each family member preferentially deaminates at its own particular “hotspot”, ranging from WRC (W is A or T, R is A or G) for hAID, to TTC for hAPOBEC3F. A recent crystal structure of the catalytic domain of APOBEC3G revealed a secondary structure comprised of a five-stranded β-sheet core flanked by six α-helices, which is believed to be conserved across the entire family. The active center loops have been shown to be responsible for both ssDNA binding and in determining “hotspot” identity. Overexpression of these enzymes has been linked to genomic instability and cancer, thus highlighting the importance of sequence-specific targeting.

[0320] Some aspects of this disclosure relate to the recognition that the activity of cytidine deaminase enzymes such as APOBEC enzymes can be directed to a specific site in genomic DNA. Without wishing to be bound by any particular theory, advantages of using Cas9 as a recognition agent include (1) the sequence specificity of Cas9 can be easily altered by simply changing the sgRNA sequence; and (2) Cas9 binds to its target sequence by denaturing the dsDNA, resulting in a stretch of DNA that is single-stranded and therefore a viable substrate for the deaminase. It should be understood that other catalytic domains, or catalytic domains from other deaminases, can also be used to generate fusion proteins with Cas9, and that the disclosure is not limited in this regard.

[0321] Some aspects of this disclosure are based on the recognition that Cas9:deaminase fusion proteins can efficiently deaminate nucleotides. In view of the results provided herein regarding the nucleotides that can be targeted by Cas9:deaminase fusion proteins, a person of skill in the art will be able to design suitable guide RNAs to target the fusion proteins to a target sequence that comprises a nucleotide to be deaminated.

[0322] In certain embodiments, the reference cytidine deaminase domain comprises a “FERNY” polypeptide having an amino acid sequence according to SEQ ID NO: 127 or an amino acid sequence that is at least 60%, 65%, 70%, 75%, 80%, 85%, 90%, 95, 98%, 99%, or 99.5% identical to SEQ ID NO: 127, as follows:

(SEQ ID NO: 127)
MFERNYDPRELRKETYLLYEIKWGKSGKLWRHWCQNNRTQHAEVYFLENI
FNARRFNPSTHCSITWYLSWSPCAECSQKIVDFLKEHPNVNLEIYVARLY
YHEDERNRQGLRDLVNSGVTIRIMDLPDYNYCWKTFVSDQGGDEDYWPGH
FAPWIKQYSLKL

[0323] In certain other embodiment, the evolved cytidine deaminase domain (i.e., as a result of the continuous evolution process described herein) comprises a “evoFERNY” polypeptide having an amino acid sequence according to SEQ ID NO: 128 or an amino acid sequence that is at least 60%, 65%, 70%, 75%, 80%, 85%, 90%, 95, 98%, 99%, or 99.5% identical to SEQ ID NO: 128, comprising an H102P and D104N substitutions, as follows:

(SEQ ID NO: 128)
MFERNYDPRELRKETYLLYEIKWGKSGKLWRHWCQNNRTQHAEVYFLENI
FNARRFNPSTHCSITWYLSWSPCAECSQKIVDFLKEHPNVNLEIYVARLY
YPENERNRQGLRDLVNSGVTIRIMDLPDYNYCWKTFVSDQGGDEDYWPGH
FAPWIKQYSLKL

[0324] In other embodiments, the reference cytidine deaminase domain comprises a “Rat APOBEC-1” polypeptide having an amino acid sequence according to SEQ ID NO: 129 or an amino acid sequence that is at least 60%, 65%, 70%, 75%, 80%, 85%, 90%, 95, 98%, 99%, or 99.5% identical to SEQ ID NO: 129, as follows:

(SEQ ID NO: 129)
[sequence omitted]

[0325] In certain other embodiment, the evolved cytidine deaminase domain (i.e., as a result of the continuous evolution process described herein) comprises a “evoAPOBEC” polypeptide having an amino acid sequence according to SEQ ID NO: 130 or an amino acid sequence that is at least 60%, 65%, 70%, 75%, 80%, 85%, 90%, 95, 98%, 99%, or 99.5% identical to SEQ ID NO: 130, and comprising substitutions E4K; H109N; H122L; D124N; R154H; A165S; P201S; F205S, as follows:

(SEQ ID NO: 130)
MSSKTGPVAVDPTLRRRIEPHEFEVFFDPRELRKETCLLYEINWGGRHSI
WRHTSQNTNKHVEVNFIEKFTTERYFCPNTRCSITWFLSWSPCGECSRAI
TEFLSRYPNVTLFIYIARLYHLANPRNRQGLRDLISSGVTIQIMTEQESG
YCWHNFVNYSPSNESHWPRYPHLWVRLYVLELYCIILGLPPCLNILRRKQ
SQLTSFTIALQSCHYQRLPPHILWATGLK

[0326] In still other embodiments, the reference cytidine deaminase domain comprises a “Petromyzon marinus CDA1 (pmCDA1)” polypeptide having an amino acid sequence according to SEQ ID NO: 131 or an amino acid sequence that is at least 60%, 65%, 70%, 75%, 80%, 85%, 90%, 95, 98%, 99%, or 99.5% identical to SEQ ID NO: 131, as follows:

(SEQ ID NO: 131)
MTDAEYVRIHEKLDIYTFKKQFFNNKKSVSHRCYVLFELKRRGERRACFW
GYAVNKPQSGTERGIHAEIFSIRKVEEYLRDNPGQFTINWYSSWSPCADC
AEKILEWYNQELRGNGHTLKIWACKLYYEKNARNQIGLWNLRDNGVGLNV
MVSEHYQCCRKIFIQSSHNQLNENRWLEKTLKRAEKRRSELSIMIQVKIL
HTTKSPAV

[0327] In other embodiment, the evolved cytidine deaminase domain (i.e., as a result of the continuous evolution process described herein) comprises a “evoCDA” polypeptide having an amino acid sequence according to SEQ ID NO: 132 or an amino acid sequence that is at least 60%, 65%, 70%, 75%, 80%, 85%, 90%, 95, 98%, 99%, or 99.5% identical to SEQ ID NO: 132 and comprising substitutions F23S; A123V; I195F, as follows:

(SEQ ID NO: 132)
MTDAEYVRIHEKLDIYTFKKQFSNNKKSVSHRCYVLFELKRRGERRACFW
GYAVNKPQSGTERGIHAEIFSIRKVEEYLRDNPGQFTINWYSSWSPCADC
AEKILEWYNQELRGNGHTLKIWVCKLYYEKNARNQIGLWNLRDNGVGLNV
MVSEHYQCCRKIFIQSSHNQLNENRWLEKTLKRAEKRRSELSIMFQVKIL
HTTKSPAV

[0328] In yet other embodiments, the reference cytidine deaminase domain comprises a “Anc689 APOBEC” polypeptide having an amino acid sequence according to SEQ ID NO: 133 or an amino acid sequence that is at least 60%, 65%, 70%, 75%, 80%, 85%, 90%, 95, 98%, 99%, or 99.5% identical to SEQ ID NO: 133, as follows:

(SEQ ID NO: 133)
MSSETGPVAVDPTLRRRIEPHEFEVFFDPRELRKETCLLYEIKWGTSHKI
WRHSSKNTTKHVEVNFIEKFTSERHFCPSTSCSITWFLSWSPCGECSKAI
TEFLSQHPNVTLVIYVARLYHHMDQQNRQGLRDLVNSGVTIQIMTAPEYD
YCWRNFVNYPPGKEAHWPRYPPLWMKLYALELHAGILGLPPCLNILRRKQ
PQLTFFTIALQSCHYQRLPPHILWATGLK

[0329] In other embodiments, the evolved cytidine deaminase domain (i.e., as a result of the continuous evolution process described herein) comprises a “evoAnc689 APOBEC” polypeptide having an amino acid sequence according to SEQ ID NO: 134 or an amino acid sequence that is at least 60%, 65%, 70%, 75%, 80%, 85%, 90%, 95, 98%, 99%, or 99.5% identical to SEQ ID NO: 134 and comprising substitutions E4K; H122L; D124N; R154H; A165S; P201S; F205S, as follows:

(SEQ ID NO: 134)
MSSKTGPVAVDPTLRRRIEPHEFEVFFDPRELRKETCLLYEIKWGTSHKI
WRHSSKNTTKHVEVNFIEKFTSERHFCPSTSCSITWFLSWSPCGECSKAI
TEFLSQHPNVTLVIYVARLYHLMNQQNRQGLRDLVNSGVTIQIMTAPEYD
YCWHNFVNYPPGKESHWPRYPPLWMKLYALELHAGILGLPPCLNILRRKQ
SQLTSFTIALQSCHYQRLPPHILWATGLK

[0330] In some aspects, the specification provides evolved cytidine deaminases which are used to construct base editors that have improved properties. For example, evolved cytidine deaminases, such as those provided herein, are capable of improving base editing efficiency and/or improving the ability of base editors to more efficiently edit bases regardless of the surrounding sequence. For example, in some aspects the disclosure provides evolved APOBEC deaminases (e.g., evolved rAPOBEC1) with improved base editing efficiency in the context of a 5′-G-3′ when it is 5′ to a target base (e.g., C). In some embodiments, the disclosure provides base editors comprising any of the evolved cytidine deaminases provided herein. It should be appreciated that any of the evolved cytidine deaminases provided herein may be used as a deaminase in a base editor protein, such as any of the base editors provided herein. It should also be appreciated that the disclosure contemplates cytidine deaminases having any of the mutations provided herein, for example any of the mutations described in the Examples section.

### V. Other Functional Domains

[0331] In various embodiments, the base editors and their various components may comprise additional functional moieties, such as, but not limited to, linkers, uracil glycosylase inhibitors, nuclear localization signals, split-intein sequences (to join split proteins, such as split napDNAbps, split adenine deaminases, split cytidine deaminases, split CBEs, or split ABEs), and RNA-protein recruitment domains (such as, MS2 tagging system).

### (1) Linkers

[0332] In certain embodiments, linkers may be used to link any of the protein or protein domains described herein (e.g., a deaminase domain and a Cas9 domain). The linker may be as simple as a covalent bond, or it may be a polymeric linker many atoms in length. In certain embodiments, the linker is a polypeptide or based on amino acids. In other embodiments, the linker is not peptide-like. In certain embodiments, the linker is a covalent bond (e.g., a carbon-carbon bond, disulfide bond, carbon-heteroatom bond, etc.). In certain embodiments, the linker is a carbon-nitrogen bond of an amide linkage. In certain embodiments, the linker is a cyclic or acyclic, substituted or unsubstituted, branched or unbranched aliphatic or heteroaliphatic linker. In certain embodiments, the linker is polymeric (e.g., polyethylene, polyethylene glycol, polyamide, polyester, etc.). In certain embodiments, the linker comprises a monomer, dimer, or polymer of aminoalkanoic acid. In certain embodiments, the linker comprises an aminoalkanoic acid (e.g., glycine, ethanoic acid, alanine, beta-alanine, 3-aminopropanoic acid, 4-aminobutanoic acid, 5-pentanoic acid, etc.). In certain embodiments, the linker comprises a monomer, dimer, or polymer of aminohexanoic acid (Ahx). In certain embodiments, the linker is based on a carbocyclic moiety (e.g., cyclopentane, cyclohexane). In other embodiments, the linker comprises a polyethylene glycol moiety (PEG). In other embodiments, the linker comprises amino acids. In certain embodiments, the linker comprises a peptide. In certain embodiments, the linker comprises an aryl or heteroaryl moiety. In certain embodiments, the linker is based on a phenyl ring. The linker may include functionalized moieties to facilitate attachment of a nucleophile (e.g., thiol, amino) from the peptide to the linker. Any electrophile may be used as part of the linker. Exemplary electrophiles include, but are not limited to, activated esters, activated amides, Michael acceptors, alkyl halides, aryl halides, acyl halides, and isothiocyanates.

[0333] In some embodiments, the linker is an amino acid or a plurality of amino acids (e.g., a peptide or protein). In some embodiments, the linker is a bond e.g., a covalent bond), an organic molecule, group, polymer, or chemical moiety. In some embodiments, the linker is 5-100 amino acids in length, for example, 5, 6, 7, 8, 9, 10, 11, 12, 13, 14, 15, 16, 17, 18, 19, 20, 21, 22, 23, 24, 25, 26, 27, 28, 29, 30, 31, 32, 33, 34, 35-40, 40-45, 45-50, 50-60, 60-70, 70-80, 80-90, 90-100, 100-110, 110-120, 120-130, 130-140, 140-150, or 150-200 amino acids in length. Longer or shorter linkers are also contemplated. In some embodiments, a linker comprises the amino acid sequence SGSETPGTSESATPES (SEQ ID NO: 143), which may also be referred to as the XTEN linker. In some embodiments, the linker is 32 amino acids in length. In some embodiments, the linker comprises the amino acid sequence (SGGS)₂-SGSETPGTSESATPES-(SGGS)₂ (SEQ ID NO: 144), which may also be referred to as (SGGS)₂-XTEN-(SGGS)₂ (SEQ ID NO: 144). In some embodiments, the linker comprises the amino acid sequence, wherein n is 0, 1, 2, 3, 4, 5, 6, 7, 8, 9, or 10. In some embodiments, a linker comprises the amino acid sequence SGGS (SEQ ID NO: 138). In some embodiments, a linker comprises (SGGS)ₙ (SEQ ID NO: 139), (GGGS)ₙ (SEQ ID NO: 140), (GGGGS)ₙ (SEQ ID NO: 141), (G)ₙ (SEQ ID NO: 135), (EAAAK)ₙ (SEQ ID NO: 142), (SGGS)ₙ-SGSETPGTSESATPES-(SGGS)ₙ (SEQ ID NO: 145), (GGS)n (SEQ ID NO: 137), SGSETPGTSESATPES (SEQ ID NO: 143), or (XP)ₙ (SEQ ID NO: 136) motif, or a combination of any of these, wherein n is independently an integer between 1 and 30, and wherein X is any amino acid. In some embodiments, n is 1, 2, 3, 4, 5, 6, 7, 8, 9, 10, 11, 12, 13, 14, or 15. In some embodiments, a linker comprises SGSETPGTSESATPES (SEQ ID NO: 143), and SGGS (SEQ ID NO: 138). In some embodiments, a linker comprises SGGSSGSETPGTSESATPESSGGS (SEQ ID NO: 145). In some embodiments, a linker comprises SGGSSGGSSGSETPGTSESATPESSGGSSGGS (SEQ ID NO: 144). In some embodiments, a linker comprises GGSGGSPGSPAGSPTSTEEGTSESATPESGPGTSTEPSEGSAPGSPAGSPTSTEEGTSTE PSEGSAPGTSTEPSEGSAPGTSESATPESGPGSEPATSGGSGGS (SEQ ID NO: 151). In some embodiments, the linker is 24 amino acids in length. In some embodiments, the linker comprises the amino acid sequence SGGSSGGSSGSETPGTSESATPES (SEQ ID NO: 146). In some embodiments, the linker is 40 amino acids in length. In some embodiments, the linker comprises the amino acid sequence SGGSSGGSSGSETPGTSESATPESSGGSSGGSSGGSSGGS (SEQ ID NO: 148). In some embodiments, the linker is 64 amino acids in length. In some embodiments, the linker comprises the amino acid sequence SGGSSGGSSGSETPGTSESATPESSGGSSGGSSGGSSGGSSGSETPGTSESATPESSGGSSGGS (SEQ ID NO: 149). In some embodiments, the linker is 92 amino acids in length. In some embodiments, the linker comprises the amino acid sequence PGSPAGSPTSTEEGTSESATPESGPGTSTEPSEGSAPGSPAGSPTSTEEGTSTEPSEGSAPGTSTEPSEGSAPGTSESATPESGPGSEPATS (SEQ ID NO: 150). It should be appreciated that any of the linkers provided herein may be used to link a first adenosine deaminase and a second adenosine deaminase; an adenosine deaminase (e.g., a first or a second adenosine deaminase) and a napDNAbp; a napDNAbp and an NLS; or an adenosine deaminase (e.g., a first or a second adenosine deaminase) and an NLS.

[0334] In some embodiments, any of the fusion proteins provided herein, comprise an adenosine or a cytidine deaminase and a napDNAbp that are fused to each other via a linker. In some embodiments, any of the fusion proteins provided herein, comprise a first adenosine deaminase and a second adenosine deaminase that are fused to each other via a linker. In some embodiments, any of the fusion proteins provided herein, comprise an NLS, which may be fused to an adenosine deaminase (e.g., a first and/or a second adenosine deaminase), a nucleic acid programmable DNA binding protein (napDNAbp). Various linker lengths and flexibilities between an adenosine deaminase (e.g., an engineered ecTadA) and a napDNAbp (e.g., a Cas9 domain), and/or between a first adenosine deaminase and a second adenosine deaminase can be employed (e.g., ranging from very flexible linkers of the form (GGGGS)ₙ (SEQ ID NO: 141), (GGGGS)ₙ (SEQ ID NO: 141), and (G)ₙ (SEQ ID NO: 135) to more rigid linkers of the form (EAAAK)ₙ (SEQ ID NO: 142), (SGGS)ₙ (SEQ ID NO: 139), SGSETPGTSESATPES (SEQ ID NO: 143) (see, e.g., Guilinger J P, Thompson D B, Liu D R. Fusion of catalytically inactive Cas9 to FokI nuclease improves the specificity of genome modification. Nat. Biotechnol. 2014; 32(6): 577-82; the entire contents are incorporated herein by reference) and (XP)ₙ (SEQ ID NO: 136)) in order to achieve the optimal length for deaminase activity for the specific application. In some embodiments, n is 1, 2, 3, 4, 5, 6, 7, 8, 9, 10, 11, 12, 13, 14, or 15. In some embodiments, the linker comprises a (GGS)ₙ (SEQ ID NO: 137) motif, wherein n is 1, 3, or 7. In some embodiments, the adenosine deaminase and the napDNAbp, and/or the first adenosine deaminase and the second adenosine deaminase of any of the fusion proteins provided herein are fused via a linker comprising the amino acid sequence SGSETPGTSESATPES (SEQ ID NO: 143), SGGS (SEQ ID NO: 138), SGGSSGSETPGTSESATPESSGGS (SEQ ID NO: 145), SGGSSGGSSGSETPGTSESATPESSGGSSGGS (SEQ ID NO: 144), or GGSGGSPGSPAGSPTSTEEGTSESATPESGPGTSTEPSEGSAPGSPAGSPTSTEEGTSTEPSEGSAPGTSTEPSEGSAPGTSESATPESGPGSEPATSGGSGGS (SEQ ID NO: 151). In some embodiments, the linker is 24 amino acids in length. In some embodiments, the linker comprises the amino acid sequence SGGSSGGSSGSETPGTSESATPES (SEQ ID NO: 146). In some embodiments, the linker is 32 amino acids in length. In some embodiments, the linker is 32 amino acids in length. In some embodiments, the linker comprises the amino acid sequence (SGGS)₂—SGSETPGTSESATPES-(SGGS)₂ (SEQ ID NO: 144), which may also be referred to as (SGGS)₂-XTEN-(SGGS)₂ (SEQ ID NO: 144). In some embodiments, the linker comprises the amino acid sequence, wherein n is 0, 1, 2, 3, 4, 5, 6, 7, 8, 9, or 10. In some embodiments, the linker is 40 amino acids in length. In some embodiments, the linker comprises the amino acid sequence SGGSSGGSSGSETPGTSESATPESSGGSSGGSSGGSSGGS (SEQ ID NO: 148). In some embodiments, the linker is 64 amino acids in length. In some embodiments, the linker comprises the amino acid sequence SGGSSGGSSGSETPGTSESATPESSGGSSGGSSGGSSGGSSGSETPGTSESATPESSGGSSGGS (SEQ ID NO: 149). In some embodiments, the linker is 92 amino acids in length. In some embodiments, the linker comprises the amino acid sequence PGSPAGSPTSTEEGTSESATPESGPGTSTEPSEGSAPGSPAGSPTSTEEGTSTEPSEGSAPGTSTEPSEGSAPGTSESATPESGPGSEPATS (SEQ ID NO: 150).

### (2) UGI Domain

[0335] In other embodiments, the base editors described herein may comprise one or more uracil glycosylase inhibitors. The term “uracil glycosylase inhibitor” or “UGI,” as used herein, refers to a protein that is capable of inhibiting a uracil-DNA glycosylase base-excision repair enzyme. In some embodiments, a UGI domain comprises a wild-type UGI or a UGI as set forth in SEQ ID NO: 163. In some embodiments, the UGI proteins provided herein include fragments of UGI and proteins homologous to a UGI or a UGI fragment. For example, in some embodiments, a UGI domain comprises a fragment of the amino acid sequence set forth in SEQ ID NO: 163. In some embodiments, a UGI fragment comprises an amino acid sequence that comprises at least 60%, at least 65%, at least 70%, at least 75%, at least 80%, at least 85%, at least 90%, at least 95%, at least 96%, at least 97%, at least 98%, at least 99%, or at least 99.5% of the amino acid sequence as set forth in SEQ ID NO: 163. In some embodiments, a UGI comprises an amino acid sequence homologous to the amino acid sequence set forth in SEQ ID NO: 163, or an amino acid sequence homologous to a fragment of the amino acid sequence set forth in SEQ ID NO: 163. In some embodiments, proteins comprising UGI or fragments of UGI or homologs of UGI or UGI fragments are referred to as “UGI variants.” A UGI variant shares homology to UGI, or a fragment thereof. For example a UGI variant is at least 70% identical, at least 75% identical, at least 80% identical, at least 85% identical, at least 90% identical, at least 95% identical, at least 96% identical, at least 97% identical, at least 98% identical, at least 99% identical, at least 99.5% identical, or at least 99.9% identical to a wild type UGI or a UGI as set forth in SEQ ID NO: 163. In some embodiments, the UGI variant comprises a fragment of UGI, such that the fragment is at least 70% identical, at least 80% identical, at least 90% identical, at least 95% identical, at least 96% identical, at least 97% identical, at least 98% identical, at least 99% identical, at least 99.5% identical, or at least 99.9% to the corresponding fragment of wild-type UGI or a UGI as set forth in SEQ ID NO: 163. In some embodiments, the UGI comprises the following amino acid sequence:

[0336] Uracil-DNA glycosylase inhibitor:

>sp|P14739|UNGI_BPPB2
(SEQ ID NO: 163)
MTNLSDIIEKETGKQLVIQESILMLPEEVEEVIGNKPESDILVHTAYDES
TDENVMLLTSDAPEYKPWALVIQDSNGENKIKML.

[0337] The base editors described herein may comprise more than one UGI domain, which may be separated by one or more linkers as described herein. It will also be understood that in the context of the herein disclosed base editors, the UGI domain may be linked to a deaminase domain or

### (3) NLS Domains

[0338] In various embodiments, the base editor proteins may comprise one or more nuclear localization sequences (NLS), which help promote translocation of a protein into the cell nucleus. Such sequences are well-known in the art and can include the following examples:

| | | SEQUENCE |
|---|---|---|
| DESCRIPTION | SEQUENCE | IDENTIFIER |
| NLS OF SV40 | PKKKRKV | 152 |
| LARGE T-AG | | |
| NLS OF | VSRKRPRP | 153 |
| POLYOMA | | |
| LARGE T-AG | | |
| NLS OF C- | PAAKRVKLD | 155 |
| MYC | | |
| NLS OF TUS- | KLKIKRPVK | 154 |
| PROTEIN | | |
| NLS OF | EGAPPAKRAR | 156 |
| HEPATITIS D | | |
| VIRUS | | |
| ANTIGEN | | |
| NLS OF | PPQPKKKPLDGE | 157 |
| MURINE P53 | | |
| NLS | MKRTADGSEFESPKKKRKV | 158 |
| NLS OF | AVKRPAATKKAGQAKKKKL | 159 |
| NUCLEOPLASM | D | |
| IN | | |
| NLS OF PE1 | SGGSKRTADGSEFEPKKKR | 160 |
| AND PE2 | KV | |
| NLS OF EGL- | MSRRRKANPTKLSENAKKL | 161 |
| 13 | AKEVEN | |
| NLS | MDSLLMNRRKFLYQFKNVR | 162 |
| | WAKGRRETYLC | |

[0339] The NLS examples above are non-limiting. The base editor proteins may comprise any known NLS sequence, including any of those described in Cokol et al., “Finding nuclear localization signals,” EMBO Rep., 2000, 1(5): 411-415 and Freitas et al., “Mechanisms and Signals for the Nuclear Import of Proteins,” Current Genomics, 2009, 10(8): 550-7, each of which are incorporated herein by reference.

[0340] In various embodiments, the base editors and constructs encoding the base editors disclosed herein further comprise one or more, preferably, at least two nuclear localization signals. In certain embodiments, the base editors comprise at least two NLSs. In embodiments with at least two NLSs, the NLSs can be the same NLSs or they can be different NLSs. In addition, the NLSs may be expressed as part of a fusion protein with the remaining portions of the base editors. In some embodiments, one or more of the NLSs are bipartite NLSs (“bpNLS”). In certain embodiments, the disclosed fusion proteins comprise two bipartite NLSs. In some embodiments, the disclosed fusion proteins comprise more than two bipartite NLSs.

[0341] The location of the NLS fusion can be at the N-terminus, the C-terminus, or within a sequence of a base editor (e.g., inserted between the encoded napDNAbp component (e.g., Cas9) and a deaminase (e.g., a cytidine of adenine deaminase).

[0342] The NLSs may be any known NLS sequence in the art. The NLSs may also be any future-discovered NLSs for nuclear localization. The NLSs also may be any naturally-occurring NLS, or any non-naturally occurring NLS (e.g., an NLS with one or more desired mutations).

The term “nuclear localization sequence” or “NLS” refers to an amino acid sequence that promotes import of a protein into the cell nucleus, for example, by nuclear transport. Nuclear localization sequences are known in the art and would be apparent to the skilled artisan. For example, NLS sequences are described in Plank et al., International PCT application PCT/EP2000/011690, filed Nov. 23, 2000, published as WO/2001/038547 on May 31, 2001, the contents of which are incorporated herein by reference. In some embodiments, an NLS comprises the amino acid sequence PKKKRKV (SEQ ID NO: 152), MDSLLMNRRKFLYQFKNVRWAKGRRETYLC (SEQ ID NO: 162), KRTADGSEFESPKKKRKV (SEQ ID NO: 467), or KRTADGSEFEPKKKRKV (SEQ ID NO: 468). In other embodiments, NLS comprises the amino acid sequences NLSKRPAAIKKAGQAKKKK (SEQ ID NO: 469), PAAKRVKLD (SEQ ID NO: 155), RQRRNELKRSF (SEQ ID NO: 470), NQSSNFGPMKGGNFGGRSSGPYGGGGQYFAKPRNQGGY (SEQ ID NO: 471).

[0343] In one aspect of the disclosure, a base editor may be modified with one or more nuclear localization signals (NLS), preferably at least two NLSs. In certain embodiments, the base editors are modified with two or more NLSs. The disclosure contemplates the use of any nuclear localization signal known in the art at the time of the disclosure, or any nuclear localization signal that is identified or otherwise made available in the state of the art after the time of the instant filing. A representative nuclear localization signal is a peptide sequence that directs the protein to the nucleus of the cell in which the sequence is expressed. A nuclear localization signal is predominantly basic, can be positioned almost anywhere in a protein's amino acid sequence, generally comprises a short sequence of four amino acids (Autieri & Agrawal, (1998) J. Biol. Chem. 273: 14731-37, incorporated herein by reference) to eight amino acids, and is typically rich in lysine and arginine residues (Magin et al., (2000) Virology 274: 11-16, incorporated herein by reference). Nuclear localization signals often comprise proline residues. A variety of nuclear localization signals have been identified and have been used to effect transport of biological molecules from the cytoplasm to the nucleus of a cell. See, e.g., Tinland et al., (1992) Proc. Natl. Acad. Sci. U.S.A. 89:7442-46; Moede et al., (1999) FEBS Lett. 461:229-34, which is incorporated by reference. Translocation is currently thought to involve nuclear pore proteins.

[0344] Most NLSs can be classified in three general groups: (i) a monopartite NLS exemplified by the SV40 large T antigen NLS (PKKKRKV (SEQ ID NO: 152)); (ii) a bipartite motif consisting of two basic domains separated by a variable number of spacer amino acids and exemplified by the Xenopus nucleoplasmin NLS (KRXXXXXXXXXXKKKL (SEQ ID NO: 472)); and (iii) noncanonical sequences such as M9 of the hnRNP Al protein, the influenza virus nucleoprotein NLS, and the yeast Gal4 protein NLS (Dingwall and Laskey 1991).

Nuclear localization signals appear at various points in the amino acid sequences of proteins. NLS's have been identified at the N-terminus, the C-terminus and in the central region of proteins. Thus, the disclosure provides base editors that may be modified with one or more NLSs at the C-terminus, the N-terminus, as well as at in internal region of the base editor. The residues of a longer sequence that do not function as component NLS residues should be selected so as not to interfere, for example tonically or sterically, with the nuclear localization signal itself. Therefore, although there are no strict limits on the composition of an NLS-comprising sequence, in practice, such a sequence can be functionally limited in length and composition.

[0345] The present disclosure contemplates any suitable means by which to modify a base editor to include one or more NLSs. In one aspect, the base editors may be engineered to express a base editor protein that is translationally fused at its N-terminus or its C-terminus (or both) to one or more NLSs, i.e., to form a base editor-NLS fusion construct. In other embodiments, the base editor-encoding nucleotide sequence may be genetically modified to incorporate a reading frame that encodes one or more NLSs in an internal region of the encoded base editor. In addition, the NLSs may include various amino acid linkers or spacer regions encoded between the base editor and the N-terminally, C-terminally, or internally-attached NLS amino acid sequence, e.g, and in the central region of proteins. Thus, the present disclosure also provides for nucleotide constructs, vectors, and host cells for expressing fusion proteins that comprise a base editor and one or more NLSs.

[0346] The base editors described herein may also comprise nuclear localization signals which are linked to a base editor through one or more linkers, e.g., and polymeric, amino acid, nucleic acid, polysaccharide, chemical, or nucleic acid linker element. The linkers within the contemplated scope of the disclosure are not intended to have any limitations and can be any suitable type of molecule (e.g., polymer, amino acid, polysaccharide, nucleic acid, lipid, or any synthetic chemical linker domain) and be joined to the base editor by any suitable strategy that effectuates forming a bond (e.g., covalent linkage, hydrogen bonding) between the base editor and the one or more NLSs.

### (4) Split-Intein Domains

[0347] It will be understood that in some embodiments (e.g., delivery of a base editor in vivo using AAV particles), it may be advantageous to split a polypeptide (e.g., a deaminase or a napDNAbp) or a fusion protein (e.g., a base editor) into an N-terminal half and a C-terminal half, delivery them separately, and then allow their colocalization to reform the complete protein (or fusion protein as the case may be) within the cell. Separate halves of a protein or a fusion protein may each comprise a split-intein tag to facilitate the reformation of the complete protein or fusion protein by the mechanism of protein trans splicing.

[0348] Protein trans-splicing, catalyzed by split inteins, provides an entirely enzymatic method for protein ligation. A split-intein is essentially a contiguous intein (e.g. a mini-intein) split into two pieces named N-intein and C-intein, respectively. The N-intein and C-intein of a split intein can associate non-covalently to form an active intein and catalyze the splicing reaction essentially in same way as a contiguous intein does. Split inteins have been found in nature and also engineered in laboratories. As used herein, the term “split intein” refers to any intein in which one or more peptide bond breaks exists between the N-terminal and C-terminal amino acid sequences such that the N-terminal and C-terminal sequences become separate molecules that can non-covalently reassociate, or reconstitute, into an intein that is functional for trans-splicing reactions. Any catalytically active intein, or fragment thereof, may be used to derive a split intein for use in the methods of the invention. For example, in one aspect the split intein may be derived from a eukaryotic intein. In another aspect, the split intein may be derived from a bacterial intein. In another aspect, the split intein may be derived from an archaeal intein. Preferably, the split intein so-derived will possess only the amino acid sequences essential for catalyzing trans-splicing reactions.

[0349] As used herein, the “N-terminal split intein (In)” refers to any intein sequence that comprises an N-terminal amino acid sequence that is functional for trans-splicing reactions. An In thus also comprises a sequence that is spliced out when trans-splicing occurs. An In can comprise a sequence that is a modification of the N-terminal portion of a naturally occurring intein sequence. For example, an In can comprise additional amino acid residues and/or mutated residues so long as the inclusion of such additional and/or mutated residues does not render the In non-functional in trans-splicing. Preferably, the inclusion of the additional and/or mutated residues improves or enhances the trans-splicing activity of the In.

[0350] As used herein, the “C-terminal split intein (Ic)” refers to any intein sequence that comprises a C-terminal amino acid sequence that is functional for trans-splicing reactions. In one aspect, the Ic comprises 4 to 7 contiguous amino acid residues, at least 4 amino acids of which are from the last β-strand of the intein from which it was derived. An Ic thus also comprises a sequence that is spliced out when trans-splicing occurs. An Ic can comprise a sequence that is a modification of the C-terminal portion of a naturally occurring intein sequence. For example, an Ic can comprise additional amino acid residues and/or mutated residues so long as the inclusion of such additional and/or mutated residues does not render the In non-functional in trans-splicing. Preferably, the inclusion of the additional and/or mutated residues improves or enhances the trans-splicing activity of the Ic.

[0351] In some embodiments of the invention, a peptide linked to an Ic or an In can comprise an additional chemical moiety including, among others, fluorescence groups, biotin, polyethylene glycol (PEG), amino acid analogs, unnatural amino acids, phosphate groups, glycosyl groups, radioisotope labels, and pharmaceutical molecules. In other embodiments, a peptide linked to an Ic can comprise one or more chemically reactive groups including, among others, ketone, aldehyde, Cys residues and Lys residues. The N-intein and C-intein of a split intein can associate non-covalently to form an active intein and catalyze the splicing reaction when an “intein-splicing polypeptide (ISP)” is present. As used herein, “intein-splicing polypeptide (ISP)” refers to the portion of the amino acid sequence of a split intein that remains when the Ic, In, or both, are removed from the split intein. In certain embodiments, the In comprises the ISP. In another embodiment, the Ic comprises the ISP. In yet another embodiment, the ISP is a separate peptide that is not covalently linked to In nor to Ic.

[0352] Split inteins may be created from contiguous inteins by engineering one or more split sites in the unstructured loop or intervening amino acid sequence between the −12 conserved beta-strands found in the structure of mini-inteins. Some flexibility in the position of the split site within regions between the beta-strands may exist, provided that creation of the split will not disrupt the structure of the intein, the structured beta-strands in particular, to a sufficient degree that protein splicing activity is lost.

[0353] In protein trans-splicing, one precursor protein consists of an N-extein part followed by the N-intein, another precursor protein consists of the C-intein followed by a C-extein part, and a trans-splicing reaction (catalyzed by the N- and C-inteins together) excises the two intein sequences and links the two extein sequences with a peptide bond. Protein trans-splicing, being an enzymatic reaction, can work with very low (e.g. micromolar) concentrations of proteins and can be carried out under physiological conditions.

[0354] Exemplary sequences are as follows:

| NAME | SEQUENCE OF LIGAND-DEPENDENT INTEIN |
|---|---|
| 2-4 INTEIN: | CLAEGTRIFDPVTGTTHRIEDVVDGRKPIHVVAAAKDGTLLARPVV |
| | SWFDQGTRDVIGLRIAGGAIVWATPDHKVLTEYGWRAAGELRKGDR |
| | VAGPGGSGNSLALSLTADQMVSALLDAEPPILYSEYDPTSPFSEAS |
| | MMGLLTNLADRELVHMINWAKRVPGFVDLTLHDQAHLLECAWLEIL |
| | MIGLVWRSMEHPGKLLFAPNLLLDRNQGKCVEGMVEIFDMLLATSS |
| | RFRMMNLQGEEFVCLKSIILLNSGVYTFLSSTLKSLEEKDHIHRAL |
| | DKITDTLIHLMAKAGLTLQQQHQRLAQLLLILSHIRHMSNKGMEHL |
| | YSMKYKNVVPLYDLLLEMLDAHRLHAGGSGASRVQAFADALDDKFL |
| | HDMLAEELRYSVIREVLPTRRARTFDLEVEELHTLVAEGVVVHNC |
| | (SEQ ID NO: 164) |
| 3-2 INTEIN | CLAEGTRIFDPVTGTTHRIEDVVDGRKPIHVVAVAKDGTLLARPVV |
| | SWFDQGTRDVIGLRIAGGAIVWATPDHKVLTEYGWRAAGELRKGDR |
| | VAGPGGSGNSLALSLTADQMVSALLDAEPPILYSEYDPTSPFSEAS |
| | MMGLLTNLADRELVHMINWAKRVPGFVDLTLHDQAHLLECAWLEIL |
| | MIGLVWRSMEHPGKLLFAPNLLLDRNQGKCVEGMVEIFDMLLATSS |
| | RFRMMNLQGEEFVCLKSIILLNSGVYTFLSSTLKSLEEKDHIHRAL |
| | DKITDTLIHLMAKAGLTLQQQHQRLAQLLLILSHIRHMSNKGMEHL |
| | YSMKYTNVVPLYDLLLEMLDAHRLHAGGSGASRVQAFADALDDKFL |
| | HDMLAEELRYSVIREVLPTRRARTFDLEVEELHTLVAEGVVVHNC |
| | (SEQ ID NO: 165) |
| 30R3-1 INTEIN | CLAEGTRIFDPVTGTTHRIEDVVDGRKPIHVVAAAKDGTLLARPVV |
| | SWFDQGTRDVIGLRIAGGATVWATPDHKVLTEYGWRAAGELRKGDR |
| | VAGPGGSGNSLALSLTADQMVSALLDAEPPIPYSEYDPTSPFSEAS |
| | MMGLLTNLADRELVHMINWAKRVPGFVDLTLHDQAHLLECAWLEIL |
| | MIGLVWRSMEHPGKLLFAPNLLLDRNQGKCVEGMVEIFDMLLATSS |
| | RFRMMNLQGEEFVCLKSIILLNSGVYTFLSSTLKSLEEKDHIHRAL |
| | DKITDTLIHLMAKAGLTLQQQHQRLAQLLLILSHIRHMSNKGMEHL |
| | YSMKYKNVVPLYDLLLEMLDAHRLHAGGSGASRVQAFADALDDKFL |
| | HDMLAEGLRYSVIREVLPTRRARTFDLEVEELHTLVAEGVVVHNC |
| | (SEQ ID NO: 166) |
| 30R3-2 INTEIN | CLAEGTRIFDPVTGTTHRIEDVVDGRKPIHVVAAAKDGTLLARPVV |
| | SWFDQGTRDVIGLRIAGGATVWATPDHKVLTEYGWRAAGELRKGDR |
| | VAGPGGSGNSLALSLTADQMVSALLDAEPPILYSEYDPTSPFSEAS |
| | MMGLLTNLADRELVHMINWAKRVPGFVDLTLHDQAHLLECAWLEIL |
| | MIGLVWRSMEHPGKLLFAPNLLLDRNQGKCVEGMVEIFDMLLATSS |
| | RFRMMNLQGEEFVCLKSIILLNSGVYTFLSSTLKSLEEKDHIHRAL |
| | DKITDTLIHLMAKAGLTLQQQHQRLAQLLLILSHIRHMSNKGMEHL |
| | YSMKYKNVVPLYDLLLEMLDAHRLHAGGSGASRVQAFADALDDKFL |
| | HDMLAEELRYSVIREVLPTRRARTFDLEVEELHTLVAEGVVVHNC |
| | (SEQ ID NO: 167) |
| 30R3-3 INTEIN | CLAEGTRIFDPVTGTTHRIEDVVDGRKPIHVVAAAKDGTLLARPVV |
| | SWFDQGTRDVIGLRIAGGATVWATPDHKVLTEYGWRAAGELRKGDR |
| | VAGPGGSGNSLALSLTADQMVSALLDAEPPIPYSEYDPTSPFSEAS |
| | MMGLLTNLADRELVHMINWAKRVPGFVDLTLHDQAHLLECAWLEIL |
| | MIGLVWRSMEHPGKLLFAPNLLLDRNQGKCVEGMVEIFDMLLATSS |
| | RFRMMNLQGEEFVCLKSIILLNSGVYTFLSSTLKSLEEKDHIHRAL |
| | DKITDTLIHLMAKAGLTLQQQHQRLAQLLLILSHIRHMSNKGMEHL |
| | YSMKYKNVVPLYDLLLEMLDAHRLHAGGSGASRVQAFADALDDKFL |
| | HDMLAEELRYSVIREVLPTRRARTFDLEVEELHTLVAEGVVVHNC |
| | (SEQ ID NO: 168) |
| 37R3-1 INTEIN | CLAEGTRIFDPVTGTTHRIEDVVDGRKPIHVVAAAKDGTLLARPVV |
| | SWFDQGTRDVIGLRIAGGATVWATPDHKVLTEYGWRAAGELRKGDR |
| | VAGPGGSGNSLALSLTADQMVSALLDAEPPILYSEYNPTSPFSEAS |
| | MMGLLTNLADRELVHMINWAKRVPGFVDLTLHDQAHLLERAWLEIL |
| | MIGLVWRSMEHPGKLLFAPNLLLDRNQGKCVEGMVEIFDMLLATSS |
| | RFRMMNLQGEEFVCLKSIILLNSGVYTFLSSTLKSLEEKDHIHRAL |
| | DKITDTLIHLMAKAGLTLQQQHQRLAQLLLILSHIRHMSNKGMEHL |
| | YSMKYKNVVPLYDLLLEMLDAHRLHAGGSGASRVQAFADALDDKFL |
| | HDMLAEGLRYSVIREVLPTRRARTFDLEVEELHTLVAEGVVVHNC |
| | ((SEQ ID NO: 169) |
| 37R3-2 INTEIN | CLAEGTRIFDPVTGTTHRIEDVVDGRKPIHVVAAAKDGTLLARPVV |
| | SWFDQGTRDVIGLRIAGGAIVWATPDHKVLTEYGWRAAGELRKGDR |
| | VAGPGGSGNSLALSLTADQMVSALLDAEPPILYSEYDPTSPFSEAS |
| | MMGLLTNLADRELVHMINWAKRVPGFVDLTLHDQAHLLERAWLEIL |
| | MIGLVWRSMEHPGKLLFAPNLLLDRNQGKCVEGMVEIFDMLLATSS |
| | RFRMMNLQGEEFVCLKSIILLNSGVYTFLSSTLKSLEEKDHIHRAL |
| | DKITDTLIHLMAKAGLTLQQQHQRLAQLLLILSHIRHMSNKGMEHL |
| | YSMKYKNVVPLYDLLLEMLDAHRLHAGGSGASRVQAFADALDDKFL |
| | HDMLAEGLRYSVIREVLPTRRARTFDLEVEELHTLVAEGVVVHNC |
| | (SEQ ID NO: 170) |
| 37R3-3 INTEIN | CLAEGTRIFDPVTGTTHRIEDVVDGRKPIHVVAVAKDGTLLARPVV |
| | SWFDQGTRDVIGLRIAGGATVWATPDHKVLTEYGWRAAGELRKGDR |
| | VAGPGGSGNSLALSLTADQMVSALLDAEPPILYSEYDPTSPFSEAS |
| | MMGLLTNLADRELVHMINWAKRVPGFVDLTLHDQAHLLERAWLEIL |
| | MIGLVWRSMEHPGKLLFAPNLLLDRNQGKCVEGMVEIFDMLLATSS |
| | RFRMMNLQGEEFVCLKSIILLNSGVYTFLSSTLKSLEEKDHIHRAL |
| | DKITDTLIHLMAKAGLTLQQQHQRLAQLLLILSHIRHMSNKGMEHL |
| | YSMKYKNVVPLYDLLLEMLDAHRLHAGGSGASRVQAFADALDDKFL |
| | HDMLAEELRYSVIREVLPTRRARTFDLEVEELHTLVAEGVVVHNC |
| | (SEQ ID NO: 171) |

[0355] Although inteins are most frequently found as a contiguous domain, some exist in a naturally split form. In this case, the two fragments are expressed as separate polypeptides and must associate before splicing takes place, so-called protein trans-splicing.

[0356] An exemplary split intein is the Ssp DnaE intein, which comprises two subunits, namely, DnaE-N and DnaE-C. The two different subunits are encoded by separate genes, namely dnaE-n and dnaE-c, which encode the DnaE-N and DnaE-C subunits, respectively. DnaE is a naturally occurring split intein in Synechocytis sp. PCC6803 and is capable of directing trans-splicing of two separate proteins, each comprising a fusion with either DnaE-N or DnaE-C.

[0357] Additional naturally occurring or engineered split-intein sequences are known in the art or can be made from whole-intein sequences described herein or those available in the art. Examples of split-intein sequences can be found in Stevens et al., “A promiscuous split intein with expanded protein engineering applications,” PNAS, 2017, Vol. 114: 8538-8543; Iwai et al., “Highly efficient protein trans-splicing by a naturally split DnaE intein from Nostoc punctiforme, FEBS Lett, 580: 1853-1858, each of which are incorporated herein by reference. Additional split intein sequences can be found, for example, in WO 2013/045632, WO 2014/055782, WO 2016/069774, and EP2877490, the contents each of which are incorporated herein by reference.

In addition, protein splicing in trans has been described in vivo and in vitro (Shingledecker, et al., Gene 207:187 (1998), Southworth, et al., EMBO J. 17:918 (1998); Mills, et al., Proc. Natl. Acad. Sci. USA, 95:3543-3548 (1998); Lew, et al., J. Biol. Chem., 273:15887-15890 (1998); Wu, et al., Biochim. Biophys. Acta 35732:1 (1998b), Yamazaki, et al., J. Am. Chem. Soc. 120:5591 (1998), Evans, et al., J. Biol. Chem. 275:9091 (2000); Otomo, et al., Biochemistry 38:16040-16044 (1999); Otomo, et al., J. Biolmol. NMR 14:105-114 (1999); Scott, et al., Proc. Natl. Acad. Sci. USA 96:13638-13643 (1999)) and provides the opportunity to express a protein as to two inactive fragments that subsequently undergo ligation to form a functional product.

### (5) RNA-Protein Recruitment System

[0358] In various embodiments, two separate protein domains (e.g., a Cas9 domain and a cytidine deaminase domain) may be colocalized to one another to form a functional complex (akin to the function of a fusion protein comprising the two separate protein domains) by using an “RNA-protein recruitment system,” such as the “MS2 tagging technique.” Such systems generally tag one protein domain with an “RNA-protein interaction domain” (aka “RNA-protein recruitment domain”) and the other with an “RNA-binding protein” that specifically recognizes and binds to the RNA-protein interaction domain, e.g., a specific hairpin structure. These types of systems can be leveraged to colocalize the domains of a base editor, as well as to recruitment additional functionalities to a base editor, such as a UGI domain. In one example, the MS2 tagging technique is based on the natural interaction of the MS2 bacteriophage coat protein (“MCP” or “MS2cp”) with a stem-loop or hairpin structure present in the genome of the phage, i.e., the “MS2 hairpin.” In the case of the MS2 hairpin, it is recognized and bound by the MS2 bacteriophage coat protein (MCP). Thus, in one exemplarily scenario a deaminase-MS2 fusion can recruit a Cas9-MCP fusion.

[0359] A review of other modular RNA-protein interaction domains are described in the art, for example, in Johansson et al., “RNA recognition by the MS2 phage coat protein,” Sem Virol., 1997, Vol. 8(3): 176-185; Delebecque et al., “Organization of intracellular reactions with rationally designed RNA assemblies,” Science, 2011, Vol. 333: 470-474; Mali et al., “Cas9 transcriptional activators for target specificity screening and paired nickases for cooperative genome engineering,” Nat. Biotechnol., 2013, Vol. 31: 833-838; and Zalatan et al., “Engineering complex synthetic transcriptional programs with CRISPR RNA scaffolds,” Cell, 2015, Vol. 160: 339-350, each of which are incorporated herein by reference in their entireties. Other systems include the PP7 hairpin, which specifically recruits the PCP protein, and the “com” hairpin, which specifically recruits the Com protein. See Zalatan et al.

[0360] The nucleotide sequence of the MS2 hairpin (or equivalently referred to as the “MS2 aptamer”) is: GCCAACATGAGGATCACCCATGTCTGCAGGGCC (SEQ ID NO: 172).

[0361] The amino acid sequence of the MCP or MS2cp is:

(SEQ ID NO: 173)
GSASNFTQFVLVDNGGTGDVTVAPSNFANGVAEWISSNSRSQAYKVTCSV
RQSSAQNRKYTIKVEVPKVATQTVGGEELPVAGWRSYLNMELTIPIFATN
SDCELIVKAMQGLLKDGNPIPSAIAANSGIY.

### VI. Base Editors

[0362] In various aspects, the instant specification provides base editors and methods of using the same, along with a suitable guide RNA, to treat Spinal Muscular Atrophy (SMA) by installing precise nucleobase changes in the SMN2 gene such the resulting product has increased stability and/or activity. In one embodiment, the inventors surprisingly found that adenosine base editors could be used to efficiently edit C840T in the SMN2 gene both in vitro and in vivo, which is useful for the treatment of SMA.

[0363] The state of the art has described numerous base editors as of this filing. It will be understood that the methods and approaches herein described for editing the SMN2 gene locus may be applied to any previously known base editor, or to base editors that may be developed in the future.

[0364] Exemplary base editors that may be used in accordance with the present disclosure include those described in the following references and/or patent publications, each of which are incorporated by reference in their entireties: (a) PCT/US2014/070038 (published as WO2015/089406, Jun. 18, 2015) and its equivalents in the US or around the world; (b) PCT/US2016/058344 (published as WO2017/070632, Apr. 27, 2017) and its equivalents in the US or around the world; (c) PCT/US2016/058345 (published as WO2017/070633, Apr. 27, 2017) and its equivalent in the US or around the world; (d) PCT/US2017/045381 (published as WO2018/027078, Feb. 8, 2018) and its equivalents in the US or around the world; (e) PCT/US2017/056671 (published as WO2018/071868, Apr. 19, 2018) and its equivalents in the US or around the world; PCT/2017/048390 (WO2017/048390, Mar. 23, 2017) and its equivalents in the US or around the world; (f) PCT/US2017/068114 (not published) and its equivalents in the US or around the world; (g) PCT/US2017/068105 (not published) and its equivalents in the US or around the world; (h) PCT/US2017/046144 (WO2018/031683, Feb. 15, 2018) and its equivalents in the US or around the world; (i) PCT/US2018/024208 (not published) and its equivalents in the US or around the world; (j) PCT/2018/021878 (WO2018/021878, Feb. 1, 2018) and its equivalents in the US and around the world; (k) Komor, A. C., Kim, Y. B., Packer, M. S., Zuris, J. A. & Liu, D. R. Programmable editing of a target base in genomic DNA without double-stranded DNA cleavage. Nature 533, 420-(2016); (1) Gaudelli, N. M. et al. Programmable base editing of A.T to G.C in genomic DNA without DNA cleavage. Nature 551, 464-(2017); (m) Gehrke, et al. An APOBEC3A-Cas9 base editor with minimized bystander and off-target activities. Nat. Biotechnol. 36(10), 977-(2018); (n) Lee, S. et al. Single C-to-T substitution using engineered APOBEC3G-nCas9 base editors with minimum genome- and transcriptome-wide off-target effects. Science Advances 6, eaba1773 (2020); (o) Gaudelli, N. M. et al. “Directed Evolution of Adenine Base Editors with Increased Activity and Therapeutic Application.” Nat. Biotechnol. 38, 892-900 (2020); (p) Yu, Y. et al. “Next-generation cytosine base editors with minimized unguided DNA and RNA off-target events and high on-target activity.” Nat. Commun. 11 (2020); and (q) any of the references listed in this specification entitled “References” and which reports or describes a base editor known in the art.

[0365] In various aspects, the improved or modified base editors described herein have the following generalized structures:

### [A]-[B] or [B]-[A],

[0366] wherein [A] is a napDNAbp and [B] is nucleic acid effector domain (e.g., an adenosine deaminase, or cytidine deaminase), and “]-[” represents an optional a linker that joins the [A] and [B] domains together, either covalently or non-covalently.

[0367] Such base editors may also comprise one or more additional functional moieties, [C], such as UGI domains or NLS domains, joined optionally through a linker to [A] and/or [B].

[0368] In some embodiments, the base editors provided herein can be made as a recombinant fusion protein comprising one or more protein domains, thereby generating a base editor. In certain embodiments, the base editors provided herein comprise one or more features that improve the base editing activity (e.g., efficiency, selectivity, and/or specificity) of the base editor proteins. For example, the base editor proteins provided herein may comprise a Cas9 domain that has reduced nuclease activity. In some embodiments, the base editor proteins provided herein may have a Cas9 domain that does not have nuclease activity (dCas9), or a Cas9 domain that cuts one strand of a duplexed DNA molecule, referred to as a Cas9 nickase (nCas9). Without wishing to be bound by any particular theory, the presence of the catalytic residue (e.g., H840) maintains the activity of the Cas9 to cleave the non-edited (e.g., non-deaminated) strand containing a T opposite the targeted A. Mutation of the catalytic residue (e.g., D10 to A10) of Cas9 prevents cleavage of the edited strand containing the targeted A residue. Such Cas9 variants are able to generate a single-strand DNA break (nick) at a specific location based on the gRNA-defined target sequence, leading to repair of the non-edited strand, ultimately resulting in a T to C change on the non-edited strand.

[0369] In particular, the disclosure provides adenosine base editors that can be used to edit C840T in an SMN2 gene to treat SMA. Exemplary domains used in base editing fusion proteins, including adenosine deaminases, napDNA/RNAbp (e.g., Cas9), and nuclear localization sequences (NLSs) are described in further detail below.

[0370] Some aspects of the disclosure provide fusion proteins comprising a nucleic acid programmable DNA binding protein (napDNAbp) and an adenosine deaminase. In some embodiments, any of the fusion proteins provided herein is a base editor. In some embodiments, the napDNAbp is a Cas9 domain, a Cpf1 domain, a CasX domain, a CasY domain, a C2c1 domain, a C2c2 domain, a C2c3 domain, or an Argonaute domain. In some embodiments, the napDNAbp is any napDNAbp provided herein. Some aspects of the disclosure provide fusion proteins comprising a Cas9 domain and an adenosine deaminase. The Cas9 domain may be any of the Cas9 domains or Cas9 proteins (e.g., dCas9 or nCas9) provided herein. In some embodiments, any of the Cas9 domains or Cas9 proteins (e.g., dCas9 or nCas9) provided herein may be fused with any of the deaminases provided herein. In some embodiments, the fusion protein comprises the structure:
[0371] NH₂-[deaminase]-[napDNAbp]-COOH; or
[0372] NH₂-[napDNAbp]-[deaminase]-COOH

[0373] In some embodiments, the fusion proteins comprising a deaminase and a napDNAbp (e.g., Cas9 domain) do not include a linker sequence. In some embodiments, a linker is present between the deaminase domain and the napDNAbp. In some embodiments, the “]-[” used in the general architecture above indicates the presence of an optional linker. In some embodiments, the deaminase and the napDNAbp are fused via any of the linkers provided herein. For example, in some embodiments the deaminase and the napDNAbp are fused via any of the linkers provided below in the section entitled “Linkers”. In some embodiments, the deaminase and the napDNAbp are fused via a linker that comprises between 1 and and 200 amino acids. In some embodiments, the adenosine deaminase and the napDNAbp are fused via a linker that comprises from 1 to 5, 1 to 10, 1 to 20, 1 to 30, 1 to 40, 1 to 50, 1 to 60, 1 to 80, 1 to 100, 1 to 150, 1 to 200, 5 to 10, 5 to 20, 5 to 30, 5 to 40, 5 to 60, 5 to 80, 5 to 100, 5 to 150, 5 to 200, 10 to 20, 10 to 30, 10 to 40, 10 to 50, 10 to 60, 10 to 80, 10 to 100, 10 to 150, 10 to 200, 20 to 30, 20 to 40, 20 to 50, 20 to 60, 20 to 80, 20 to 100, 20 to 150, 20 to 200, 30 to 40, 30 to 50, 30 to 60, 30 to 80, 30 to 100, 30 to 150, 30 to 200, 40 to 50, 40 to 60, 40 to 80, 40 to 100, 40 to 150, 40 to 200, 50 to 60 50 to 80, 50 to 100, 50 to 150, 50 to 200, 60 to 80, 60 to 100, 60 to 150, 60 to 200, 80 to 100, 80 to 150, 80 to 200, 100 to 150, 100 to 200, or 150 to 200 amino acids in length. In some embodiments, the adenosine deaminase and the napDNAbp are fused via a linker that comprises 3, 4, 16, 24, 32, 64, 100, or 104 amino acids in length.

[0374] In some embodiments, the based editors provided herein further comprise one or more nuclear targeting sequences, for example, a nuclear localization sequence (NLS). In some embodiments, a NLS comprises an amino acid sequence that facilitates the importation of a protein, that comprises an NLS, into the cell nucleus (e.g., by nuclear transport). In some embodiments, any of the fusion proteins provided herein further comprise a nuclear localization sequence (NLS). In some embodiments, the NLS is fused to the N-terminus of the fusion protein. In some embodiments, the NLS is fused to the C-terminus of the fusion protein. In some embodiments, the NLS is fused to the N-terminus of the napDNAbp. In some embodiments, the NLS is fused to the C-terminus of the napDNAbp. In some embodiments, the NLS is fused to the N-terminus of the adenosine deaminase. In some embodiments, the NLS is fused to the C-terminus of the adenosine deaminase. In some embodiments, the NLS is fused to the fusion protein via one or more linkers. In some embodiments, the NLS is fused to the fusion protein without a linker. In some embodiments, the NLS comprises an amino acid sequence of any one of the NLS sequences provided or referenced herein. In some embodiments, the NLS comprises an amino acid sequence as set forth in any one of SEQ ID NOs: 152-162. Additional nuclear localization sequences are known in the art and would be apparent to the skilled artisan. For example, NLS sequences are described in Plank et al., PCT/EP2000/011690, the contents of which are incorporated herein by reference for their disclosure of exemplary nuclear localization sequences.

[0375] In some embodiments, the general architecture of exemplary fusion proteins with a deaminase and a napDNAbp comprises any one of the following structures, where NLS is a nuclear localization sequence (e.g., any NLS provided herein), NH₂ is the N-terminus of the fusion protein, and COOH is the C-terminus of the fusion protein. Fusion proteins comprising an adenosine deaminase, a napDNAbp, and a NLS:

### NH₂-[NLS]-[deaminase]-[napDNAbp]-COOH;

### NH₂-[deaminase]-[NLS]-[napDNAbp]-COOH;

### NH₂-[deaminase]-[napDNAbp]-[NLS]-COOH;

### NH₂-[NLS]-[napDNAbp]-[deaminase]-COOH;

### NH₂-[napDNAbp]-[NLS]-[deaminase]-COOH; and

### NH₂-[napDNAbp]-[deaminase]-[NLS]-COOH.

[0376] Some aspects of the disclosure provide ABEs (adenine base editors) that comprise a nucleic acid programmable DNA binding protein (napDNAbp) and at least two adenosine deaminase domains. Without wishing to be bound by any particular theory, dimerization of adenosine deaminases (e.g., in cis or in trans) may improve the ability (e.g., efficiency) of the fusion protein to modify a nucleic acid base, for example to deaminate adenine. In some embodiments, any of the fusion proteins may comprise 2, 3, 4 or 5 adenosine deaminase domains. In some embodiments, any of the fusion proteins provided herein comprise two adenosine deaminases. In some embodiments, any of the fusion proteins provided herein contain only two adenosine deaminases. In some embodiments, the adenosine deaminases are the same. In some embodiments, the adenosine deaminases are any of the adenosine deaminases provided herein. In some embodiments, the adenosine deaminases are different. In some embodiments, the first adenosine deaminase is any of the adenosine deaminases provided herein, and the second adenosine is any of the adenosine deaminases provided herein, but is not identical to the first adenosine deaminase. As one example, the fusion protein may comprise a first adenosine deaminase and a second adenosine deaminase that both comprise the amino acid sequence of SEQ ID NO: 91, which contains a W23R; H36L; P48A; R51L; L84F; A106V; D108N; H123Y; S146C; D147Y; R152P; E155V; I156F; and K157N mutation from ecTadA (SEQ ID NO: 89). In some embodiments, the fusion protein may comprise a first adenosine deaminase that comprises the amino acid sequence, e.g., of SEQ ID NO: 89, and a second adenosine deaminase domain that comprises the amino amino acid sequence of TadA7.10 of SEQ ID NO: 79. Additional fusion protein constructs comprising two adenosine deaminase domains are illustrated herein and are provided in the art.

[0377] In some embodiments, the fusion protein comprises two adenosine deaminases (e.g., a first adenosine deaminase and a second adenosine deaminase). In some embodiments, the fusion protein comprises a first adenosine deaminase and a second adenosine deaminase. In some embodiments, the first adenosine deaminase is N-terminal to the second adenosine deaminase in the fusion protein. In some embodiments, the first adenosine deaminase is C-terminal to the second adenosine deaminase in the fusion protein. In some embodiments, the first adenosine deaminase and the second deaminase are fused directly or via a linker. In some embodiments, the linker is any of the linkers provided herein, for example, any of the linkers described in the “Linkers” section.

[0378] In some embodiments, the first adenosine deaminase is the same as the second adenosine deaminase. In some embodiments, the first adenosine deaminase and the second adenosine deaminase are any of the adenosine deaminases described herein. In some embodiments, the first adenosine deaminase and the second adenosine deaminase are different. In some embodiments, the first adenosine deaminase is any of the adenosine deaminases provided herein. In some embodiments, the second adenosine deaminase is any of the adenosine deaminases provided herein but is not identical to the first adenosine deaminase. In some embodiments, the first adenosine deaminase is an ecTadA adenosine deaminase. In some embodiments, the first adenosine deaminase comprises an amino acid sequence that is at least least 60%, at least 65%, at least 70%, at least 75%, at least 80%, at least 85%, at least 90%, at least 95%, at least 96%, at least 97%, at least 98%, at least 99%, or at least 99.5% identical to any one of the amino acid sequences set forth in any one of SEQ ID NOs: 78-91, and 403-404, or to any of the adenosine deaminases provided herein. In some embodiments, the first adenosine deaminase comprises an amino acid sequence, e.g., of SEQ ID NO: 78-91, and 403-404. In some embodiments, the second adenosine deaminase comprises an amino acid sequence that is at least least 60%, at least 65%, at least 70%, at least 75%, at least 80%, at least 85%, at least 90%, at least 95%, at least 96%, at least 97%, at least 98%, at least 99%, or at least 99.5% identical to any one of the amino acid sequences set forth in any one of SEQ ID NOs: 78-91, and 403-404, or to any of the deaminases provided herein. The amino acid sequences can be the same or different. In some embodiments, the second adenosine deaminase comprises an amino acid sequence of any one of SEQ ID NOs: 78-91, and 403-404

[0379] In some embodiments, the general architecture of exemplary fusion proteins with a first adenosine deaminase, a second adenosine deaminase, and a napDNAbp comprises any one of the following structures, where NLS is a nuclear localization sequence (e.g., any NLS provided herein), NH₂ is the N-terminus of the fusion protein, and COOH is the C-terminus of the fusion protein.

[0380] Thus, in some embodiments, the disclosure provides based editors comprising a first adenosine deaminase, a second adenosine deaminase, and a napDNAbp, such as:

NH₂-[first adenosine deaminase]-[second adenosine deaminase]-[napDNAbp]-COOH;
NH₂-[first adenosine deaminase]-[napDNAbp]-[second adenosine deaminase]-COOH;
NH₂-[napDNAbp]-[first adenosine deaminase]-[second adenosine deaminase]-COOH;
NH₂-[second adenosine deaminase]-[first adenosine deaminase]-[napDNAbp]-COOH;
NH₂-[second adenosine deaminase]-[napDNAbp]-[first adenosine deaminase]-COOH;
NH₂-[napDNAbp]-[second adenosine deaminase]-[first adenosine deaminase]-COOH;

[0381] In some embodiments, the fusion proteins provided herein do not comprise a linker. In some embodiments, a linker is present between one or more of the domains or proteins (e.g., first adenosine deaminase, second adenosine deaminase, and/or napDNAbp). In some embodiments, the “−” used in the general architecture above indicates the presence of an optional linker.

[0382] In other embodiments, the disclosure provides based editors comprising a first adenosine deaminase, a second adenosine deaminase, a napDNAbp, and an NLS, such as:

NH₂-[NLS]-[first adenosine deaminase]-[second adenosine deaminase]-[napDNAbp]-COOH;
NH₂-[first adenosine deaminase]-[NLS]-[second adenosine deaminase]-[napDNAbp]-COOH;
NH₂-[first adenosine deaminase]-[second adenosine deaminase]-[NLS]-[napDNAbp]-COOH;
NH₂-[first adenosine deaminase]-[second adenosine deaminase]-[napDNAbp]-[NLS]-COOH;
NH₂-[NLS]-[first adenosine deaminase]-[napDNAbp]-[second adenosine deaminase]-COOH;
NH₂-[first adenosine deaminase]-[NLS]-[napDNAbp]-[second adenosine deaminase]-COOH;
NH₂-[first adenosine deaminase]-[napDNAbp]-[NLS]-[second adenosine deaminase]-COOH;
NH₂-[first adenosine deaminase]-[napDNAbp]-[second adenosine deaminase]-[NLS]-COOH;
NH₂-[NLS]-[napDNAbp]-[first adenosine deaminase]-[second adenosine deaminase]-COOH;
NH₂-[napDNAbp]-[NLS]-[first adenosine deaminase]-[second adenosine deaminase]-COOH;
NH₂-[napDNAbp]-[first adenosine deaminase]-[NLS]-[second adenosine deaminase]-COOH;
NH₂-[napDNAbp]-[first adenosine deaminase]-[second adenosine deaminase]-[NLS]-COOH;
NH₂-[NLS]-[second adenosine deaminase]-[first adenosine deaminase]-[napDNAbp]-COOH;
NH₂-[second adenosine deaminase]-[NLS]-[first adenosine deaminase]-[napDNAbp]-COOH;
NH₂-[second adenosine deaminase]-[first adenosine deaminase]-[NLS]-[napDNAbp]-COOH;
NH₂-[second adenosine deaminase]-[first adenosine deaminase]-[napDNAbp]-[NLS]-COOH;
NH₂-[NLS]-[second adenosine deaminase]-[napDNAbp]-[first adenosine deaminase]-COOH;
NH₂-[second adenosine deaminase]-[NLS]-[napDNAbp]-[first adenosine deaminase]-COOH;
NH₂-[second adenosine deaminase]-[napDNAbp]-[NLS]-[first adenosine deaminase]-COOH;
NH₂-[second adenosine deaminase]-[napDNAbp]-[first adenosine deaminase]-[NLS]-COOH;
NH₂-[NLS]-[napDNAbp]-[second adenosine deaminase]-[first adenosine deaminase]-COOH;
NH₂-[napDNAbp]-[NLS]-[second adenosine deaminase]-[first adenosine deaminase]-COOH;
NH₂-[napDNAbp]-[second adenosine deaminase]-[NLS]-[first adenosine deaminase]-COOH;
NH₂-[napDNAbp]-[second adenosine deaminase]-[first adenosine deaminase]-[NLS]-COOH;

[0383] In some embodiments, the fusion proteins provided herein do not comprise a linker. In some embodiments, a linker is present between one or more of the domains or proteins (e.g., first adenosine deaminase, second adenosine deaminase, napDNAbp, and/or NLS). In some embodiments, the “−” used in the general architecture above indicates the presence of an optional linker.

[0384] It should be appreciated that the fusion proteins of the present disclosure may comprise one or more additional features. For example, in some embodiments, the fusion protein may comprise cytoplasmic localization sequences, export sequences, such as nuclear export sequences, or other localization sequences, as well as sequence tags that are useful for solubilization, purification, or detection of the fusion proteins. Suitable protein tags provided herein include, but are not limited to, biotin carboxylase carrier protein (BCCP) tags, myc-tags, calmodulin-tags, FLAG-tags, hemagglutinin (HA)-tags, polyhistidine tags, also referred to as histidine tags or His-tags, maltose binding protein (MBP)-tags, nus-tags, glutathione-S-transferase (GST)-tags, green fluorescent protein (GFP)-tags, thioredoxin-tags, S-tags, Softags (e.g., Softag 1, Softag 3), strep-tags, biotin ligase tags, FlAsH tags, V5 tags, and SBP-tags. Additional suitable sequences will be apparent to those of skill in the art. In some embodiments, the fusion protein comprises one or more His tags.

### (1) Exemplary ABEs

[0385] Some aspects of the disclosure provide base editors comprising a napDNAbp domain (e.g., an nCas9 domain) and one or more adenosine deaminase domains (e.g., a heterodimer of adenosine deaminases). Such fusion proteins can be referred to as adenosine base editors (ABEs). In some embodiments, the ABEs have reduced off-target effects. In some embodiments, the base editors comprise adenine base editors for multiplexing applications. In still other embodiments, the base editors comprise ancestrally reconstructed adenine base editors.

[0386] The present disclosure provides motifs of newly discovered mutations to TadA 7.10 (SEQ ID NO: 79) (the TadA* used in ABEmax) that yield adenosine deaminase variants and confer broader Cas compatibility to the deaminase. These motifs also confer reduced off-target effects, such as reduced RNA editing activity and off-target DNA editing activity, on the base editor. The base editors of the present disclosure comprise one or more of the disclosed adenosine deaminase variants. In other embodiments, the base editors may comprise one or more adenosine deaminases having two or more such substitutions in combination. In some embodiments, the base editors comprise adenosine deaminases comprising comprises a sequence with at least 80%, 85%, 90%, 95%, 98%, 99%, or 99.5% sequence identity to SEQ ID NO: 91 (TadA-8e).

[0387] Exemplary ABEs of this disclosure comprise the monomer and dimer versions of the following editors: ABE8e, SaABE8e, SaKKH-ABE8e, NG-ABE8e, ABE-xCas9, ABE8e-NRTH, ABE8e-NRRH, ABE8e-NRCH, ABE8e-NG-CP1041, ABE8e-VRQR-CP1041, ABE8e-CP1041, ABE8e-CP1028, ABE8e-VRQR, ABE8e-LbCas12a (LbABE8e), ABE8e-AsCas12a (enAsABE8e), ABE8e-SpyMac, ABE8e (TadA-8e V106W), ABE8e (K20A,R21A), and ABE8e(TadA-8e V82G). The monomer version refers to an editor having an adenosine deaminase domain that comprises a TadA8e and does not comprise a second adenosine deaminase enzyme. The dimer version refers refers to an editor having an adenosine deaminase domain that comprises a first and second adenosine deaminase, i.e., a wild-type TadA enzyme and a TadA8e enzyme.

[0388] Exemplary ABEs include, without limitation, the following fusion proteins (for the purposes of clarity, and wherein shown, the adenosine deaminase domain is shown in bold; mutations of the ecTadA deaminase domain are shown in bold underlining; the XTEN linker is shown in italics; the UGI/AAG/EndoV domains are shown in bold italics; and NLS is shown in underlined italics), and any base editors comprise sequences that are at least least 85%, at least 90%, at least 95%, at least 98%, at least 99%, or at least 99.5% identical to any of the following amino acid sequences:

ecTadA(wt)-XTEN-nCas9-NLS
(SEQ ID NO: 174)
MSEVEFSHEYWMRHALTLAKRAWDEREVPVGAVLVHNNRVIGEGWNRPIG
RHDPTAHAEIMALRQGGLVMQNYRLIDATLYVTLEPCVMCAGAMIHSRIG
RVVFGARDAKTGAAGSLMDVLHHPGMNHRVEITEGILADECAALLSDFFR
MRRQEIKAQKKAQSSTDSGSETPGTSESATPESDKKYSIGLAIGTNSVGW
AVITDEYKVPSKKFKVLGNTDRHSIKKNLIGALLFDSGETAEATRLKRTA
RRRYTRRKNRICYLQEIFSNEMAKVDDSFFHRLEESFLVEEDKKHERHPI
FGNIVDEVAYHEKYPTIYHLRKKLVDSTDKADLRLIYLALAHMIKFRGHF
LIEGDLNPDNSDVDKLFIQLVQTYNQLFEENPINASGVDAKAILSARLSK
SRRLENLIAQLPGEKKNGLFGNLIALSLGLTPNFKSNFDLAEDAKLQLSK
DTYDDDLDNLLAQIGDQYADLFLAAKNLSDAILLSDILRVNTEITKAPLS
ASMIKRYDEHHQDLTLLKALVRQQLPEKYKEIFFDQSKNGYAGYIDGGAS
QEEFYKFIKPILEKMDGTEELLVKLNREDLLRKQRTFDNGSIPHQIHLGE
LHAILRRQEDFYPFLKDNREKIEKILTFRIPYYVGPLARGNSRFAWMTRK
SEETITPWNFEEVVDKGASAQSFIERMTNFDKNLPNEKVLPKHSLLYEYF
TVYNELTKVKYVTEGMRKPAFLSGEQKKAIVDLLFKTNRKVTVKQLKEDY
FKKIECFDSVEISGVEDRFNASLGTYHDLLKIIKDKDFLDNEENEDILED
IVLTLTLFEDREMIEERLKTYAHLFDDKVMKQLKRRRYTGWGRLSRKLIN
GIRDKQSGKTILDFLKSDGFANRNFMQLIHDDSLTFKEDIQKAQVSGQGD
SLHEHIANLAGSPAIKKGILQTVKVVDELVKVMGRHKPENIVIEMARENQ
TTQKGQKNSRERMKRIEEGIKELGSQILKEHPVENTQLQNEKLYLYYLQN
GRDMYVDQELDINRLSDYDVDHIVPQSFLKDDSIDNKVLTRSDKNRGKSD
NVPSEEVVKKMKNYWRQLLNAKLITQRKFDNLTKAERGGLSELDKAGFIK
RQLVETRQITKHVAQILDSRMNTKYDENDKLIREVKVITLKSKLVSDFRK
DFQFYKVREINNYHHAHDAYLNAVVGTALIKKYPKLESEFVYGDYKVYDV
RKMIAKSEQEIGKATAKYFFYSNIMNFFKTEITLANGEIRKRPLIETNGE
TGEIVWDKGRDFATVRKVLSMPQVNIVKKTEVQTGGFSKESILPKRNSDK
LIARKKDWDPKKYGGFDSPTVAYSVLVVAKVEKGKSKKLKSVKELLGITI
MERSSFEKNPIDFLEAKGYKEVKKDLIIKLPKYSLFELENGRKRMLASAG
ELQKGNELALPSKYVNFLYLASHYEKLKGSPEDNEQKQLFVEQHKHYLDE
IIEQISEFSKRVILADANLDKVLSAYNKHRDKPIREQAENIIHLFTLTNL
GAPAAFKYFDTTIDRKRYTSTKEVLDATLIHQSITGLYETRIDLSQLGGD
SGGSPKKKRKV
ecTadA(D108N)-XTEN-nCas9-NLS
(mammalian construct, active on DNA,
A to G editing):
(SEQ ID NO: 175)
MSEVEFSHEYWMRHALTLAKRAWDEREVPVGAVLVHNNRVIGEGWNRPIG
RHDPTAHAEIMALRQGGLVMQNYRLIDATLYVTLEPCVMCAGAMIHSRIG
RVVFGARNAKTGAAGSLMDVLHHPGMNHRVEITEGILADECAALLSDFFR
MRRQEIKAQKKAQSSTDSGSETPGTSESATPESDKKYSIGLAIGTNSVGW
AVITDEYKVPSKKFKVLGNTDRHSIKKNLIGALLFDSGETAEATRLKRTA
RRRYTRRKNRICYLQEIFSNEMAKVDDSFFHRLEESFLVEEDKKHERHPI
FGNIVDEVAYHEKYPTIYHLRKKLVDSTDKADLRLIYLALAHMIKFRGHF
LIEGDLNPDNSDVDKLFIQLVQTYNQLFEENPINASGVDAKAILSARLSK
SRRLENLIAQLPGEKKNGLFGNLIALSLGLTPNFKSNFDLAEDAKLQLSK
DTYDDDLDNLLAQIGDQYADLFLAAKNLSDAILLSDILRVNTEITKAPLS
ASMIKRYDEHHQDLTLLKALVRQQLPEKYKEIFFDQSKNGYAGYIDGGAS
QEEFYKFIKPILEKMDGTEELLVKLNREDLLRKQRTFDNGSIPHQIHLGE
LHAILRRQEDFYPFLKDNREKIEKILTFRIPYYVGPLARGNSRFAWMTRK
SEETITPWNFEEVVDKGASAQSFIERMTNFDKNLPNEKVLPKHSLLYEYF
TVYNELTKVKYVTEGMRKPAFLSGEQKKAIVDLLFKTNRKVTVKQLKEDY
FKKIECFDSVEISGVEDRFNASLGTYHDLLKIIKDKDFLDNEENEDILED
IVLTLTLFEDREMIEERLKTYAHLFDDKVMKQLKRRRYTGWGRLSRKLIN
GIRDKQSGKTILDFLKSDGFANRNFMQLIHDDSLTFKEDIQKAQVSGQGD
SLHEHIANLAGSPAIKKGILQTVKVVDELVKVMGRHKPENIVIEMARENQ
TTQKGQKNSRERMKRIEEGIKELGSQILKEHPVENTQLQNEKLYLYYLQN
GRDMYVDQELDINRLSDYDVDHIVPQSFLKDDSIDNKVLTRSDKNRGKSD
NVPSEEVVKKMKNYWRQLLNAKLITQRKFDNLTKAERGGLSELDKAGFIK
RQLVETRQITKHVAQILDSRMNTKYDENDKLIREVKVITLKSKLVSDFRK
DFQFYKVREINNYHHAHDAYLNAVVGTALIKKYPKLESEFVYGDYKVYDV
RKMIAKSEQEIGKATAKYFFYSNIMNFFKTEITLANGEIRKRPLIETNGE
TGEIVWDKGRDFATVRKVLSMPQVNIVKKTEVQTGGFSKESILPKRNSDK
LIARKKDWDPKKYGGFDSPTVAYSVLVVAKVEKGKSKKLKSVKELLGITI
MERSSFEKNPIDFLEAKGYKEVKKDLIIKLPKYSLFELENGRKRMLASAG
ELQKGNELALPSKYVNFLYLASHYEKLKGSPEDNEQKQLFVEQHKHYLDE
IIEQISEFSKRVILADANLDKVLSAYNKHRDKPIREQAENIIHLFTLTNL
GAPAAFKYFDTTIDRKRYTSTKEVLDATLIHQSITGLYETRIDLSQLGGD
SGGSPKKKRKV
ecTadA(D108G)-XTEN-nCas9-NLS
(mammalian construct, active on DNA,
A to G editing):
(SEQ ID NO: 176)
MSEVEFSHEYWMRHALTLAKRAWDEREVPVGAVLVHNNRVIGEGWNRPIG
RHDPTAHAEIMALRQGGLVMQNYRLIDATLYVTLEPCVMCAGAMIHSRIG
RVVFGARGAKTGAAGSLMDVLHHPGMNHRVEITEGILADECAALLSDFFR
MRRQEIKAQKKAQSSTDSGSETPGTSESATPESDKKYSIGLAIGTNSVGW
AVITDEYKVPSKKFKVLGNTDRHSIKKNLIGALLFDSGETAEATRLKRTA
RRRYTRRKNRICYLQEIFSNEMAKVDDSFFHRLEESFLVEEDKKHERHPI
FGNIVDEVAYHEKYPTIYHLRKKLVDSTDKADLRLIYLALAHMIKFRGHF
LIEGDLNPDNSDVDKLFIQLVQTYNQLFEENPINASGVDAKAILSARLSK
SRRLENLIAQLPGEKKNGLFGNLIALSLGLTPNFKSNFDLAEDAKLQLSK
DTYDDDLDNLLAQIGDQYADLFLAAKNLSDAILLSDILRVNTEITKAPLS
ASMIKRYDEHHQDLTLLKALVRQQLPEKYKEIFFDQSKNGYAGYIDGGAS
QEEFYKFIKPILEKMDGTEELLVKLNREDLLRKQRTFDNGSIPHQIHLGE
LHAILRRQEDFYPFLKDNREKIEKILTFRIPYYVGPLARGNSRFAWMTRK
SEETITPWNFEEVVDKGASAQSFIERMTNFDKNLPNEKVLPKHSLLYEYF
TVYNELTKVKYVTEGMRKPAFLSGEQKKAIVDLLFKTNRKVTVKQLKEDY
FKKIECFDSVEISGVEDRFNASLGTYHDLLKIIKDKDFLDNEENEDILED
IVLTLTLFEDREMIEERLKTYAHLFDDKVMKQLKRRRYTGWGRLSRKLIN
GIRDKQSGKTILDFLKSDGFANRNFMQLIHDDSLTFKEDIQKAQVSGQGD
SLHEHIANLAGSPAIKKGILQTVKVVDELVKVMGRHKPENIVIEMARENQ
TTQKGQKNSRERMKRIEEGIKELGSQILKEHPVENTQLQNEKLYLYYLQN
GRDMYVDQELDINRLSDYDVDHIVPQSFLKDDSIDNKVLTRSDKNRGKSD
NVPSEEVVKKMKNYWRQLLNAKLITQRKFDNLTKAERGGLSELDKAGFIK
RQLVETRQITKHVAQILDSRMNTKYDENDKLIREVKVITLKSKLVSDFRK
DFQFYKVREINNYHHAHDAYLNAVVGTALIKKYPKLESEFVYGDYKVYDV
RKMIAKSEQEIGKATAKYFFYSNIMNFFKTEITLANGEIRKRPLIETNGE
TGEIVWDKGRDFATVRKVLSMPQVNIVKKTEVQTGGFSKESILPKRNSDK
LIARKKDWDPKKYGGFDSPTVAYSVLVVAKVEKGKSKKLKSVKELLGITI
MERSSFEKNPIDFLEAKGYKEVKKDLIIKLPKYSLFELENGRKRMLASAG
ELQKGNELALPSKYVNFLYLASHYEKLKGSPEDNEQKQLFVEQHKHYLDE
IIEQISEFSKRVILADANLDKVLSAYNKHRDKPIREQAENIIHLFTLTNL
GAPAAFKYFDTTIDRKRYTSTKEVLDATLIHQSITGLYETRIDLSQLGGD
SGGSPKKKRKV
ecTadA(D108V)-XTEN-nCas9-NLS
(mammalian construct, active on DNA,
A to G editing):
(SEQ ID NO: 177)
MSEVEFSHEYWMRHALTLAKRAWDEREVPVGAVLVHNNRVIGEGWNRPIG
RHDPTAHAEIMALRQGGLVMQNYRLIDATLYVTLEPCVMCAGAMIHSRIG
RVVFGARVAKTGAAGSLMDVLHHPGMNHRVEITEGILADECAALLSDFFR
MRRQEIKAQKKAQSSTDSGSETPGTSESATPESDKKYSIGLAIGTNSVGW
AVITDEYKVPSKKFKVLGNTDRHSIKKNLIGALLFDSGETAEATRLKRTA
RRRYTRRKNRICYLQEIFSNEMAKVDDSFFHRLEESFLVEEDKKHERHPI
FGNIVDEVAYHEKYPTIYHLRKKLVDSTDKADLRLIYLALAHMIKFRGHF
LIEGDLNPDNSDVDKLFIQLVQTYNQLFEENPINASGVDAKAILSARLSK
SRRLENLIAQLPGEKKNGLFGNLIALSLGLTPNFKSNFDLAEDAKLQLSK
DTYDDDLDNLLAQIGDQYADLFLAAKNLSDAILLSDILRVNTEITKAPLS
ASMIKRYDEHHQDLTLLKALVRQQLPEKYKEIFFDQSKNGYAGYIDGGAS
QEEFYKFIKPILEKMDGTEELLVKLNREDLLRKQRTFDNGSIPHQIHLGE
LHAILRRQEDFYPFLKDNREKIEKILTFRIPYYVGPLARGNSRFAWMTRK
SEETITPWNFEEVVDKGASAQSFIERMTNFDKNLPNEKVLPKHSLLYEYF
TVYNELTKVKYVTEGMRKPAFLSGEQKKAIVDLLFKTNRKVTVKQLKEDY
FKKIECFDSVEISGVEDRFNASLGTYHDLLKIIKDKDFLDNEENEDILED
IVLTLTLFEDREMIEERLKTYAHLFDDKVMKQLKRRRYTGWGRLSRKLIN
GIRDKQSGKTILDFLKSDGFANRNFMQLIHDDSLTFKEDIQKAQVSGQGD
SLHEHIANLAGSPAIKKGILQTVKVVDELVKVMGRHKPENIVIEMARENQ
TTQKGQKNSRERMKRIEEGIKELGSQILKEHPVENTQLQNEKLYLYYLQN
GRDMYVDQELDINRLSDYDVDHIVPQSFLKDDSIDNKVLTRSDKNRGKSD
NVPSEEVVKKMKNYWRQLLNAKLITQRKFDNLTKAERGGLSELDKAGFIK
RQLVETRQITKHVAQILDSRMNTKYDENDKLIREVKVITLKSKLVSDFRK
DFQFYKVREINNYHHAHDAYLNAVVGTALIKKYPKLESEFVYGDYKVYDV
RKMIAKSEQEIGKATAKYFFYSNIMNFFKTEITLANGEIRKRPLIETNGE
TGEIVWDKGRDFATVRKVLSMPQVNIVKKTEVQTGGFSKESILPKRNSDK
LIARKKDWDPKKYGGFDSPTVAYSVLVVAKVEKGKSKKLKSVKELLGITI
MERSSFEKNPIDFLEAKGYKEVKKDLIIKLPKYSLFELENGRKRMLASAG
ELQKGNELALPSKYVNFLYLASHYEKLKGSPEDNEQKQLFVEQHKHYLDE
IIEQISEFSKRVILADANLDKVLSAYNKHRDKPIREQAENIIHLFTLTNL
GAPAAFKYFDTTIDRKRYTSTKEVLDATLIHQSITGLYETRIDLSQLGGD
SGGSPKKKRKV
ecTadA(H8Y D108N N127S)-XTEN-dCas9
(variant resulting from first round of
evolution in bacteria):
(SEQ ID NO: 178)
MSEVEFSYEYWMRHALTLAKRAWDEREVPVGAVLVHNNRVIGEGWNRPIG
RHDPTAHAEIMALRQGGLVMQNYRLIDATLYVTLEPCVMCAGAMIHSRIG
RVVFGARNAKTGAAGSLMDVLHHPGMSHRVEITEGILADECAALLSDFFR
MRRQEIKAQKKAQSSTDSGSETPGTSESATPESDKKYSIGLAIGTNSVGW
AVITDEYKVPSKKFKVLGNTDRHSIKKNLIGALLFDSGETAEATRLKRTA
RRRYTRRKNRICYLQEIFSNEMAKVDDSFFHRLEESFLVEEDKKHERHPI
FGNIVDEVAYHEKYPTIYHLRKKLVDSTDKADLRLIYLALAHMIKFRGHF
LIEGDLNPDNSDVDKLFIQLVQTYNQLFEENPINASGVDAKAILSARLSK
SRRLENLIAQLPGEKKNGLFGNLIALSLGLTPNFKSNFDLAEDAKLQLSK
DTYDDDLDNLLAQIGDQYADLFLAAKNLSDAILLSDILRVNTEITKAPLS
ASMIKRYDEHHQDLTLLKALVRQQLPEKYKEIFFDQSKNGYAGYIDGGAS
QEEFYKFIKPILEKMDGTEELLVKLNREDLLRKQRTFDNGSIPHQIHLGE
LHAILRRQEDFYPFLKDNREKIEKILTFRIPYYVGPLARGNSRFAWMTRK
SEETITPWNFEEVVDKGASAQSFIERMTNFDKNLPNEKVLPKHSLLYEYF
TVYNELTKVKYVTEGMRKPAFLSGEQKKAIVDLLFKTNRKVTVKQLKEDY
FKKIECFDSVEISGVEDRFNASLGTYHDLLKIIKDKDFLDNEENEDILED
IVLTLTLFEDREMIEERLKTYAHLFDDKVMKQLKRRRYTGWGRLSRKLIN
GIRDKQSGKTILDFLKSDGFANRNFMQLIHDDSLTFKEDIQKAQVSGQGD
SLHEHIANLAGSPAIKKGILQTVKVVDELVKVMGRHKPENIVIEMARENQ
TTQKGQKNSRERMKRIEEGIKELGSQILKEHPVENTQLQNEKLYLYYLQN
GRDMYVDQELDINRLSDYDVDAIVPQSFLKDDSIDNKVLTRSDKNRGKSD
NVPSEEVVKKMKNYWRQLLNAKLITQRKFDNLTKAERGGLSELDKAGFIK
RQLVETRQITKHVAQILDSRMNTKYDENDKLIREVKVITLKSKLVSDFRK
DFQFYKVREINNYHHAHDAYLNAVVGTALIKKYPKLESEFVYGDYKVYDV
RKMIAKSEQEIGKATAKYFFYSNIMNFFKTEITLANGEIRKRPLIETNGE
TGEIVWDKGRDFATVRKVLSMPQVNIVKKTEVQTGGFSKESILPKRNSDK
LIARKKDWDPKKYGGFDSPTVAYSVLVVAKVEKGKSKKLKSVKELLGITI
MERSSFEKNPIDFLEAKGYKEVKKDLIIKLPKYSLFELENGRKRMLASAG
ELQKGNELALPSKYVNFLYLASHYEKLKGSPEDNEQKQLFVEQHKHYLDE
IIEQISEFSKRVILADANLDKVLSAYNKHRDKPIREQAENIIHLFTLTNL
GAPAAFKYFDTTIDRKRYTSTKEVLDATLIHQSITGLYETRIDLSQLGGD
(H8Y D108N N127S E155X)-XTEN-dCas9; X = D,
G or V (Enriched variants from second round
of evolution (in bacteria) ecTadA):
(SEQ ID NO: 179)
MSEVEFSYEYWMRHALTLAKRAWDEREVPVGAVLVHNNRVIGEGWNRPIG
RHDPTAHAEIMALRQGGLVMQNYRLIDATLYVTLEPCVMCAGAMIHSRIG
RVVFGARNAKTGAAGSLMDVLHHPGMSHRVEITEGILADECAALLSDFFR
MRRQXIKAQKKAQSSTDSGSETPGTSESATPESDKKYSIGLAIGTNSVGW
AVITDEYKVPSKKFKVLGNTDRHSIKKNLIGALLFDSGETAEATRLKRTA
RRRYTRRKNRICYLQEIFSNEMAKVDDSFFHRLEESFLVEEDKKHERHPI
FGNIVDEVAYHEKYPTIYHLRKKLVDSTDKADLRLIYLALAHMIKFRGHF
LIEGDLNPDNSDVDKLFIQLVQTYNQLFEENPINASGVDAKAILSARLSK
SRRLENLIAQLPGEKKNGLFGNLIALSLGLTPNFKSNFDLAEDAKLQLSK
DTYDDDLDNLLAQIGDQYADLFLAAKNLSDAILLSDILRVNTEITKAPLS
ASMIKRYDEHHQDLTLLKALVRQQLPEKYKEIFFDQSKNGYAGYIDGGAS
QEEFYKFIKPILEKMDGTEELLVKLNREDLLRKQRTFDNGSIPHQIHLGE
LHAILRRQEDFYPFLKDNREKIEKILTFRIPYYVGPLARGNSRFAWMTRK
SEETITPWNFEEVVDKGASAQSFIERMTNFDKNLPNEKVLPKHSLLYEYF
TVYNELTKVKYVTEGMRKPAFLSGEQKKAIVDLLFKTNRKVTVKQLKEDY
FKKIECFDSVEISGVEDRFNASLGTYHDLLKIIKDKDFLDNEENEDILED
IVLTLTLFEDREMIEERLKTYAHLFDDKVMKQLKRRRYTGWGRLSRKLIN
GIRDKQSGKTILDFLKSDGFANRNFMQLIHDDSLTFKEDIQKAQVSGQGD
SLHEHIANLAGSPAIKKGILQTVKVVDELVKVMGRHKPENIVIEMARENQ
TTQKGQKNSRERMKRIEEGIKELGSQILKEHPVENTQLQNEKLYLYYLQN
GRDMYVDQELDINRLSDYDVDAIVPQSFLKDDSIDNKVLTRSDKNRGKSD
NVPSEEVVKKMKNYWRQLLNAKLITQRKFDNLTKAERGGLSELDKAGFIK
RQLVETRQITKHVAQILDSRMNTKYDENDKLIREVKVITLKSKLVSDFRK
DFQFYKVREINNYHHAHDAYLNAVVGTALIKKYPKLESEFVYGDYKVYDV
RKMIAKSEQEIGKATAKYFFYSNIMNFFKTEITLANGEIRKRPLIETNGE
TGEIVWDKGRDFATVRKVLSMPQVNIVKKTEVQTGGFSKESILPKRNSDK
LIARKKDWDPKKYGGFDSPTVAYSVLVVAKVEKGKSKKLKSVKELLGITI
MERSSFEKNPIDFLEAKGYKEVKKDLIIKLPKYSLFELENGRKRMLASAG
ELQKGNELALPSKYVNFLYLASHYEKLKGSPEDNEQKQLFVEQHKHYLDE
IIEQISEFSKRVILADANLDKVLSAYNKHRDKPIREQAENIIHLFTLTNL
GAPAAFKYFDTTIDRKRYTSTKEVLDATLIHQSITGLYETRIDLSQLGGD
ABE7.7
ecTadA_{(wildtype)}-(SGGS)₂-XTEN-(SGGS)₂-ecTadA_{(W23L}_
_{H36L}_P48A_R51L_L84F_A106V_D108N_H123Y_
_{S146C}_D147Y_R152P_E155V_I156F_K157N)-
(SGGS)₂-XTEN-(SGGS)₂_nCas9_SGGS_NLS
(SEQ ID NO: 180)
MSEVEFSHEYWMRHALTLAKRAWDEREVPVGAVLVHNNRVIGEGWNRPIG
RHDPTAHAEIMALRQGGLVMQNYRLIDATLYVTLEPCVMCAGAMIHSRIG
RVVFGARDAKTGAAGSLMDVLHHPGMNHRVEITEGILADECAALLSDFFR
MRRQEIKAQKKAQSSTDSGGSSGGSSGSETPGTSESATPESSGGSSGGSS
EVEFSHEYWMRHALTLAKRALDEREVPVGAVLVLNNRVIGEGWNRAIGLH
DPTAHAEIMALRQGGLVMQNYRLIDATLYVTFEPCVMCAGAMIHSRIGRV
VFGVRNAKTGAAGSLMDVLHYPGMNHRVEITEGILADECAALLCYFFRMP
RQVFNAQKKAQSSTDSGGSSGGSSGSETPGTSESATPESSGGSSGGSDKK
YSIGLAIGTNSVGWAVITDEYKVPSKKFKVLGNTDRHSIKKNLIGALLFD
SGETAEATRLKRTARRRYTRRKNRICYLQEIFSNEMAKVDDSFFHRLEES
FLVEEDKKHERHPIFGNIVDEVAYHEKYPTIYHLRKKLVDSTDKADLRLI
YLALAHMIKFRGHFLIEGDLNPDNSDVDKLFIQLVQTYNQLFEENPINAS
GVDAKAILSARLSKSRRLENLIAQLPGEKKNGLFGNLIALSLGLTPNFKS
NFDLAEDAKLQLSKDTYDDDLDNLLAQIGDQYADLFLAAKNLSDAILLSD
ILRVNTEITKAPLSASMIKRYDEHHQDLTLLKALVRQQLPEKYKEIFFDQ
SKNGYAGYIDGGASQEEFYKFIKPILEKMDGTEELLVKLNREDLLRKQRT
FDNGSIPHQIHLGELHAILRRQEDFYPFLKDNREKIEKILTFRIPYYVGP
LARGNSRFAWMTRKSEETITPWNFEEVVDKGASAQSFIERMTNFDKNLPN
EKVLPKHSLLYEYFTVYNELTKVKYVTEGMRKPAFLSGEQKKAIVDLLFK
TNRKVTVKQLKEDYFKKIECFDSVEISGVEDRFNASLGTYHDLLKIIKDK
DFLDNEENEDILEDIVLTLTLFEDREMIEERLKTYAHLFDDKVMKQLKRR
RYTGWGRLSRKLINGIRDKQSGKTILDFLKSDGFANRNFMQLIHDDSLTF
KEDIQKAQVSGQGDSLHEHIANLAGSPAIKKGILQTVKVVDELVKVMGRH
KPENIVIEMARENQTTQKGQKNSRERMKRIEEGIKELGSQILKEHPVENT
QLQNEKLYLYYLQNGRDMYVDQELDINRLSDYDVDHIVPQSFLKDDSIDN
KVLTRSDKNRGKSDNVPSEEVVKKMKNYWRQLLNAKLITQRKFDNLTKAE
RGGLSELDKAGFIKRQLVETRQITKHVAQILDSRMNTKYDENDKLIREVK
VITLKSKLVSDFRKDFQFYKVREINNYHHAHDAYLNAVVGTALIKKYPKL
ESEFVYGDYKVYDVRKMIAKSEQEIGKATAKYFFYSNIMNFFKTEITLAN
GEIRKRPLIETNGETGEIVWDKGRDFATVRKVLSMPQVNIVKKTEVQTGG
FSKESILPKRNSDKLIARKKDWDPKKYGGFDSPTVAYSVLVVAKVEKGKS
KKLKSVKELLGITIMERSSFEKNPIDFLEAKGYKEVKKDLIIKLPKYSLF
ELENGRKRMLASAGELQKGNELALPSKYVNFLYLASHYEKLKGSPEDNEQ
KQLFVEQHKHYLDEIIEQISEFSKRVILADANLDKVLSAYNKHRDKPIRE
QAENIIHLFTLTNLGAPAAFKYFDTTIDRKRYTSTKEVLDATLIHQSITG
LYETRIDLSQLGGDSGGSPKKKRKV
pNMG-624
ecTadA_{(wildtype)}-32 a.a. linker-ecTadA_{(W23R}_
_{H36L}_P48A_R51L_L84F_A106V_D108N_H123Y_
_{S146C}_D147Y_R152P_E155v_I156F_K157N)-
24 a.a. linker_nCas9_SGGS_NLS
(SEQ ID NO: 181)
MSEVEFSHEYWMRHALTLAKRAWDEREVPVGAVLVHNNRVIGEGWNRPIG
RHDPTAHAEIMALRQGGLVMQNYRLIDATLYVTLEPCVMCAGAMIHSRIG
RVVFGARDAKTGAAGSLMDVLHHPGMNHRVEITEGILADECAALLSDFFR
MRRQEIKAQKKAQSSTDSGGSSGGSSGSETPGTSESATPESSGGSSGGSS
EVEFSHEYWMRHALTLAKRARDEREVPVGAVLVLNNRVIGEGWNRAIGLH
DPTAHAEIMALRQGGLVMQNYRLIDATLYVTFEPCVMCAGAMIHSRIGRV
VFGVRNAKTGAAGSLMDVLHYPGMNHRVEITEGILADECAALLCYFFRMP
RQVFNAQKKAQSSTDSGGSSGGSSGSETPGTSESATPESDKKYSIGLAIG
TNSVGWAVITDEYKVPSKKFKVLGNTDRHSIKKNLIGALLFDSGETAEAT
RLKRTARRRYTRRKNRICYLQEIFSNEMAKVDDSFFHRLEESFLVEEDKK
HERHPIFGNIVDEVAYHEKYPTIYHLRKKLVDSTDKADLRLIYLALAHMI
KFRGHFLIEGDLNPDNSDVDKLFIQLVQTYNQLFEENPINASGVDAKAIL
SARLSKSRRLENLIAQLPGEKKNGLFGNLIALSLGLTPNFKSNFDLAEDA
KLQLSKDTYDDDLDNLLAQIGDQYADLFLAAKNLSDAILLSDILRVNTEI
TKAPLSASMIKRYDEHHQDLTLLKALVRQQLPEKYKEIFFDQSKNGYAGY
IDGGASQEEFYKFIKPILEKMDGTEELLVKLNREDLLRKQRTFDNGSIPH
QIHLGELHAILRRQEDFYPFLKDNREKIEKILTFRIPYYVGPLARGNSRF
AWMTRKSEETITPWNFEEVVDKGASAQSFIERMTNFDKNLPNEKVLPKHS
LLYEYFTVYNELTKVKYVTEGMRKPAFLSGEQKKAIVDLLFKTNRKVTVK
QLKEDYFKKIECFDSVEISGVEDRFNASLGTYHDLLKIIKDKDFLDNEEN
EDILEDIVLTLTLFEDREMIEERLKTYAHLFDDKVMKQLKRRRYTGWGRL
SRKLINGIRDKQSGKTILDFLKSDGFANRNFMQLIHDDSLTFKEDIQKAQ
VSGQGDSLHEHIANLAGSPAIKKGILQTVKVVDELVKVMGRHKPENIVIE
MARENQTTQKGQKNSRERMKRIEEGIKELGSQILKEHPVENTQLQNEKLY
LYYLQNGRDMYVDQELDINRLSDYDVDHIVPQSFLKDDSIDNKVLTRSDK
NRGKSDNVPSEEVVKKMKNYWRQLLNAKLITQRKFDNLTKAERGGLSELD
KAGFIKRQLVETRQITKHVAQILDSRMNTKYDENDKLIREVKVITLKSKL
VSDFRKDFQFYKVREINNYHHAHDAYLNAVVGTALIKKYPKLESEFVYGD
YKVYDVRKMIAKSEQEIGKATAKYFFYSNIMNFFKTEITLANGEIRKRPL
IETNGETGEIVWDKGRDFATVRKVLSMPQVNIVKKTEVQTGGFSKESILP
KRNSDKLIARKKDWDPKKYGGFDSPTVAYSVLVVAKVEKGKSKKLKSVKE
LLGITIMERSSFEKNPIDFLEAKGYKEVKKDLIIKLPKYSLFELENGRKR
MLASAGELQKGNELALPSKYVNFLYLASHYEKLKGSPEDNEQKQLFVEQH
KHYLDEIIEQISEFSKRVILADANLDKVLSAYNKHRDKPIREQAENIIHL
FTLTNLGAPAAFKYFDTTIDRKRYTSTKEVLDATLIHQSITGLYETRIDL
SQLGGDSGGSPKKKRKV
ABE3.2
ecTadA_{(wild-type)}-(SGGS)₂-XTEN-(SGGS)₂-ecTadA_{(L84F}_
_{A106V}_D108N_H123Y_D147Y_E155V_I156F)-
(SGGS)₂-XTEN-(SGGS)₂_nCas9_SGGS_NLS
(SEQ ID NO: 182)
MSEVEFSHEYWMRHALTLAKRAWDEREVPVGAVLVHNNRVIGEGWNRPIG
RHDPTAHAEIMALRQGGLVMQNYRLIDATLYVTLEPCVMCAGAMIHSRIG
RVVFGARDAKTGAAGSLMDVLHHPGMNHRVEITEGILADECAALLSDFFR
MRRQEIKAQKKAQSSTDSGGSSGGSSGSETPGTSESATPESSGGSSGGSS
EVEFSHEYWMRHALTLAKRAWDEREVPVGAVLVHNNRVIGEGWNRPIGRH
DPTAHAEIMALRQGGLVMQNYRLIDATLYVTFEPCVMCAGAMIHSRIGRV
VFGVRNAKTGAAGSLMDVLHYPGMNHRVEITEGILADECAALLSYFFRMR
RQVFKAQKKAQSSTDSGGSSGGSSGSETPGTSESATPESSGGSSGGSDKK
YSIGLAIGTNSVGWAVITDEYKVPSKKFKVLGNTDRHSIKKNLIGALLFD
SGETAEATRLKRTARRRYTRRKNRICYLQEIFSNEMAKVDDSFFHRLEES
FLVEEDKKHERHPIFGNIVDEVAYHEKYPTIYHLRKKLVDSTDKADLRLI
YLALAHMIKFRGHFLIEGDLNPDNSDVDKLFIQLVQTYNQLFEENPINAS
GVDAKAILSARLSKSRRLENLIAQLPGEKKNGLFGNLIALSLGLTPNFKS
NFDLAEDAKLQLSKDTYDDDLDNLLAQIGDQYADLFLAAKNLSDAILLSD
ILRVNTEITKAPLSASMIKRYDEHHQDLTLLKALVRQQLPEKYKEIFFDQ
SKNGYAGYIDGGASQEEFYKFIKPILEKMDGTEELLVKLNREDLLRKQRT
FDNGSIPHQIHLGELHAILRRQEDFYPFLKDNREKIEKILTFRIPYYVGP
LARGNSRFAWMTRKSEETITPWNFEEVVDKGASAQSFIERMTNFDKNLPN
EKVLPKHSLLYEYFTVYNELTKVKYVTEGMRKPAFLSGEQKKAIVDLLFK
TNRKVTVKQLKEDYFKKIECFDSVEISGVEDRFNASLGTYHDLLKIIKDK
DFLDNEENEDILEDIVLTLTLFEDREMIEERLKTYAHLFDDKVMKQLKRR
RYTGWGRLSRKLINGIRDKQSGKTILDFLKSDGFANRNFMQLIHDDSLTF
KEDIQKAQVSGQGDSLHEHIANLAGSPAIKKGILQTVKVVDELVKVMGRH
KPENIVIEMARENQTTQKGQKNSRERMKRIEEGIKELGSQILKEHPVENT
QLQNEKLYLYYLQNGRDMYVDQELDINRLSDYDVDHIVPQSFLKDDSIDN
KVLTRSDKNRGKSDNVPSEEVVKKMKNYWRQLLNAKLITQRKFDNLTKAE
RGGLSELDKAGFIKRQLVETRQITKHVAQILDSRMNTKYDENDKLIREVK
VITLKSKLVSDFRKDFQFYKVREINNYHHAHDAYLNAVVGTALIKKYPKL
ESEFVYGDYKVYDVRKMIAKSEQEIGKATAKYFFYSNIMNFFKTEITLAN
GEIRKRPLIETNGETGEIVWDKGRDFATVRKVLSMPQVNIVKKTEVQTGG
FSKESILPKRNSDKLIARKKDWDPKKYGGFDSPTVAYSVLVVAKVEKGKS
KKLKSVKELLGITIMERSSFEKNPIDFLEAKGYKEVKKDLIIKLPKYSLF
ELENGRKRMLASAGELQKGNELALPSKYVNFLYLASHYEKLKGSPEDNEQ
KQLFVEQHKHYLDEIIEQISEFSKRVILADANLDKVLSAYNKHRDKPIRE
QAENIIHLFTLTNLGAPAAFKYFDTTIDRKRYTSTKEVLDATLIHQSITG
LYETRIDLSQLGGDSGGSPKKKRKV
ABE5.3
ecTadA_{(wild-type)}-(SGGS)₂-XTEN-(SGGS)₂-
ecTadA_{(H36L}_R51L_L84F_A106V_D108N_H123Y_
_{S146C}_D147Y_E155V_I156F_K157N)-(SGGS)₂-
XTEN-(SGGS)₂_nCas9_SGGS_NLS
(SEQ ID NO: 183)
MSEVEFSHEYWMRHALTLAKRAWDEREVPVGAVLVHNNRVIGEGWNRPIG
RHDPTAHAEIMALRQGGLVMQNYRLIDATLYVTLEPCVMCAGAMIHSRIG
RVVFGARDAKTGAAGSLMDVLHHPGMNHRVEITEGILADECAALLSDFFR
MRRQEIKAQKKAQSSTDSGGSSGGSSGSETPGTSESATPESSGGSSGGSS
EVEFSHEYWMRHALTLAKRAWDEREVPVGAVLVLNNRVIGEGWNRPIGLH
DPTAHAEIMALRQGGLVMQNYRLIDATLYVTFEPCVMCAGAMIHSRIGRV
VFGVRNAKTGAAGSLMDVLHYPGMNHRVEITEGILADECAALLCYFFRMR
RQVFNAQKKAQSSTDSGGSSGGSSGSETPGTSESATPESSGGSSGGSDKK
YSIGLAIGTNSVGWAVITDEYKVPSKKFKVLGNTDRHSIKKNLIGALLFD
SGETAEATRLKRTARRRYTRRKNRICYLQEIFSNEMAKVDDSFFHRLEES
FLVEEDKKHERHPIFGNIVDEVAYHEKYPTIYHLRKKLVDSTDKADLRLI
YLALAHMIKFRGHFLIEGDLNPDNSDVDKLFIQLVQTYNQLFEENPINAS
GVDAKAILSARLSKSRRLENLIAQLPGEKKNGLFGNLIALSLGLTPNFKS
NFDLAEDAKLQLSKDTYDDDLDNLLAQIGDQYADLFLAAKNLSDAILLSD
ILRVNTEITKAPLSASMIKRYDEHHQDLTLLKALVRQQLPEKYKEIFFDQ
SKNGYAGYIDGGASQEEFYKFIKPILEKMDGTEELLVKLNREDLLRKQRT
FDNGSIPHQIHLGELHAILRRQEDFYPFLKDNREKIEKILTFRIPYYVGP
LARGNSRFAWMTRKSEETITPWNFEEVVDKGASAQSFIERMTNFDKNLPN
EKVLPKHSLLYEYFTVYNELTKVKYVTEGMRKPAFLSGEQKKAIVDLLFK
TNRKVTVKQLKEDYFKKIECFDSVEISGVEDRFNASLGTYHDLLKIIKDK
DFLDNEENEDILEDIVLTLTLFEDREMIEERLKTYAHLFDDKVMKQLKRR
RYTGWGRLSRKLINGIRDKQSGKTILDFLKSDGFANRNFMQLIHDDSLTF
KEDIQKAQVSGQGDSLHEHIANLAGSPAIKKGILQTVKVVDELVKVMGRH
KPENIVIEMARENQTTQKGQKNSRERMKRIEEGIKELGSQILKEHPVENT
QLQNEKLYLYYLQNGRDMYVDQELDINRLSDYDVDHIVPQSFLKDDSIDN
KVLTRSDKNRGKSDNVPSEEVVKKMKNYWRQLLNAKLITQRKFDNLTKAE
RGGLSELDKAGFIKRQLVETRQITKHVAQILDSRMNTKYDENDKLIREVK
VITLKSKLVSDFRKDFQFYKVREINNYHHAHDAYLNAVVGTALIKKYPKL
ESEFVYGDYKVYDVRKMIAKSEQEIGKATAKYFFYSNIMNFFKTEITLAN
GEIRKRPLIETNGETGEIVWDKGRDFATVRKVLSMPQVNIVKKTEVQTGG
FSKESILPKRNSDKLIARKKDWDPKKYGGFDSPTVAYSVLVVAKVEKGKS
KKLKSVKELLGITIMERSSFEKNPIDFLEAKGYKEVKKDLIIKLPKYSLF
ELENGRKRMLASAGELQKGNELALPSKYVNFLYLASHYEKLKGSPEDNEQ
KQLFVEQHKHYLDEIIEQISEFSKRVILADANLDKVLSAYNKHRDKPIRE
QAENIIHLFTLTNLGAPAAFKYFDTTIDRKRYTSTKEVLDATLIHQSITG
LYETRIDLSQLGGDSGGSPKKKRKV
pNMG-558
ecTadA_{(wiid-type)}-32 a.a. linker-ecTadA(H36L_
R51L_L84F_A106V_D108N_H123Y_S146C_
D147Y_E155V_I156F_K157N)- 24 a.a.
linker_nCas9_SGGS_NLS
(SEQ ID NO: 184)
MSEVEFSHEYWMRHALTLAKRAWDEREVPVGAVLVHNNRVIGEGWNRPIG
RHDPTAHAEIMALRQGGLVMQNYRLIDATLYVTLEPCVMCAGAMIHSRIG
RVVFGARDAKTGAAGSLMDVLHHPGMNHRVEITEGILADECAALLSDFFR
MRRQEIKAQKKAQSSTDSGGSSGGSSGSETPGTSESATPESSGGSSGGSS
EVEFSHEYWMRHALTLAKRAWDEREVPVGAVLVLNNRVIGEGWNRPIGLH
DPTAHAEIMALRQGGLVMQNYRLIDATLYVTFEPCVMCAGAMIHSRIGRV
VFGVRNAKTGAAGSLMDVLHYPGMNHRVEITEGILADECAALLCYFFRMR
RQVFNAQKKAQSSTDSGGSSGGSSGSETPGTSESATPESDKKYSIGLAIG
TNSVGWAVITDEYKVPSKKFKVLGNTDRHSIKKNLIGALLFDSGETAEAT
RLKRTARRRYTRRKNRICYLQEIFSNEMAKVDDSFFHRLEESFLVEEDKK
HERHPIFGNIVDEVAYHEKYPTIYHLRKKLVDSTDKADLRLIYLALAHMI
KFRGHFLIEGDLNPDNSDVDKLFIQLVQTYNQLFEENPINASGVDAKAIL
SARLSKSRRLENLIAQLPGEKKNGLFGNLIALSLGLTPNFKSNFDLAEDA
KLQLSKDTYDDDLDNLLAQIGDQYADLFLAAKNLSDAILLSDILRVNTEI
TKAPLSASMIKRYDEHHQDLTLLKALVRQQLPEKYKEIFFDQSKNGYAGY
IDGGASQEEFYKFIKPILEKMDGTEELLVKLNREDLLRKQRTFDNGSIPH
QIHLGELHAILRRQEDFYPFLKDNREKIEKILTFRIPYYVGPLARGNSRF
AWMTRKSEETITPWNFEEVVDKGASAQSFIERMTNFDKNLPNEKVLPKHS
LLYEYFTVYNELTKVKYVTEGMRKPAFLSGEQKKAIVDLLFKTNRKVTVK
QLKEDYFKKIECFDSVEISGVEDRFNASLGTYHDLLKIIKDKDFLDNEEN
EDILEDIVLTLTLFEDREMIEERLKTYAHLFDDKVMKQLKRRRYTGWGRL
SRKLINGIRDKQSGKTILDFLKSDGFANRNFMQLIHDDSLTFKEDIQKAQ
VSGQGDSLHEHIANLAGSPAIKKGILQTVKVVDELVKVMGRHKPENIVIE
MARENQTTQKGQKNSRERMKRIEEGIKELGSQILKEHPVENTQLQNEKLY
LYYLQNGRDMYVDQELDINRLSDYDVDHIVPQSFLKDDSIDNKVLTRSDK
NRGKSDNVPSEEVVKKMKNYWRQLLNAKLITQRKFDNLTKAERGGLSELD
KAGFIKRQLVETRQITKHVAQILDSRMNTKYDENDKLIREVKVITLKSKL
VSDFRKDFQFYKVREINNYHHAHDAYLNAVVGTALIKKYPKLESEFVYGD
YKVYDVRKMIAKSEQEIGKATAKYFFYSNIMNFFKTEITLANGEIRKRPL
IETNGETGEIVWDKGRDFATVRKVLSMPQVNIVKKTEVQTGGFSKESILP
KRNSDKLIARKKDWDPKKYGGFDSPTVAYSVLVVAKVEKGKSKKLKSVKE
LLGITIMERSSFEKNPIDFLEAKGYKEVKKDLIIKLPKYSLFELENGRKR
MLASAGELQKGNELALPSKYVNFLYLASHYEKLKGSPEDNEQKQLFVEQH
KHYLDEIIEQISEFSKRVILADANLDKVLSAYNKHRDKPIREQAENIIHL
FTLTNLGAPAAFKYFDTTIDRKRYTSTKEVLDATLIHQSITGLYETRIDL
SQLGGDSGGSPKKKRKV
pNMG-576
ecTadA_{(wild-type)}-(SGGS)₂-XTEN-(SGGS)₂-
ecTadA_{(H36L}_P48S_R51L_L84F_A106V_D108N_
_{H123Y}_S146C_D147Y_E155V_I156F_K157N)-
(SGGS)₂-XTEN-(SGGS)₂_nCas9_GGS_NLS
(SEQ ID NO: 185)
MSEVEFSHEYWMRHALTLAKRAWDEREVPVGAVLVHNNRVIGEGWNRPIG
RHDPTAHAEIMALRQGGLVMQNYRLIDATLYVTLEPCVMCAGAMIHSRIG
RVVFGARDAKTGAAGSLMDVLHHPGMNHRVEITEGILADECAALLSDFFR
MRRQEIKAQKKAQSSTDSGGSSGGSSGSETPGTSESATPESSGGSSGGSS
EVEFSHEYWMRHALTLAKRAWDEREVPVGAVLVLNNRVIGEGWNRSIGLH
DPTAHAEIMALRQGGLVMQNYRLIDATLYVTFEPCVMCAGAMIHSRIGRV
VFGVRNAKTGAAGSLMDVLHYPGMNHRVEITEGILADECAALLCYFFRMR
RQVFNAQKKAQSSTDSGGSSGGSSGSETPGTSESATPESSGGSSGGSDKK
YSIGLAIGTNSVGWAVITDEYKVPSKKFKVLGNTDRHSIKKNLIGALLFD
SGETAEATRLKRTARRRYTRRKNRICYLQEIFSNEMAKVDDSFFHRLEES
FLVEEDKKHERHPIFGNIVDEVAYHEKYPTIYHLRKKLVDSTDKADLRLI
YLALAHMIKFRGHFLIEGDLNPDNSDVDKLFIQLVQTYNQLFEENPINAS
GVDAKAILSARLSKSRRLENLIAQLPGEKKNGLFGNLIALSLGLTPNFKS
NFDLAEDAKLQLSKDTYDDDLDNLLAQIGDQYADLFLAAKNLSDAILLSD
ILRVNTEITKAPLSASMIKRYDEHHQDLTLLKALVRQQLPEKYKEIFFDQ
SKNGYAGYIDGGASQEEFYKFIKPILEKMDGTEELLVKLNREDLLRKQRT
FDNGSIPHQIHLGELHAILRRQEDFYPFLKDNREKIEKILTFRIPYYVGP
LARGNSRFAWMTRKSEETITPWNFEEVVDKGASAQSFIERMTNFDKNLPN
EKVLPKHSLLYEYFTVYNELTKVKYVTEGMRKPAFLSGEQKKAIVDLLFK
TNRKVTVKQLKEDYFKKIECFDSVEISGVEDRFNASLGTYHDLLKIIKDK
DFLDNEENEDILEDIVLTLTLFEDREMIEERLKTYAHLFDDKVMKQLKRR
RYTGWGRLSRKLINGIRDKQSGKTILDFLKSDGFANRNFMQLIHDDSLTF
KEDIQKAQVSGQGDSLHEHIANLAGSPAIKKGILQTVKVVDELVKVMGRH
KPENIVIEMARENQTTQKGQKNSRERMKRIEEGIKELGSQILKEHPVENT
QLQNEKLYLYYLQNGRDMYVDQELDINRLSDYDVDHIVPQSFLKDDSIDN
KVLTRSDKNRGKSDNVPSEEVVKKMKNYWRQLLNAKLITQRKFDNLTKAE
RGGLSELDKAGFIKRQLVETRQITKHVAQILDSRMNTKYDENDKLIREVK
VITLKSKLVSDFRKDFQFYKVREINNYHHAHDAYLNAVVGTALIKKYPKL
ESEFVYGDYKVYDVRKMIAKSEQEIGKATAKYFFYSNIMNFFKTEITLAN
GEIRKRPLIETNGETGEIVWDKGRDFATVRKVLSMPQVNIVKKTEVQTGG
FSKESILPKRNSDKLIARKKDWDPKKYGGFDSPTVAYSVLVVAKVEKGKS
KKLKSVKELLGITIMERSSFEKNPIDFLEAKGYKEVKKDLIIKLPKYSLF
ELENGRKRMLASAGELQKGNELALPSKYVNFLYLASHYEKLKGSPEDNEQ
KQLFVEQHKHYLDEIIEQISEFSKRVILADANLDKVLSAYNKHRDKPIRE
QAENIIHLFTLTNLGAPAAFKYFDTTIDRKRYTSTKEVLDATLIHQSITG
LYETRIDLSQLGGDSGGSPKKKRKV
pNMG-577
ecTadA_{(wild-type)}-(SGGS)₂-XTEN-(SGGS)₂-
ecTadA_{(H36L}_P48S_R51L_L84F_A106V_D108N_
_{H123Y}_A142N_S146C_D147Y_E155V_I156F_K157N)-
(SGGS)₂-XTEN-(SGGS)₂_nCas9_GGS_NLS
(SEQ ID NO: 186)
MSEVEFSHEYWMRHALTLAKRAWDEREVPVGAVLVHNNRVIGEGWNRPIG
RHDPTAHAEIMALRQGGLVMQNYRLIDATLYVTLEPCVMCAGAMIHSRIG
RVVFGARDAKTGAAGSLMDVLHHPGMNHRVEITEGILADECAALLSDFFR
MRRQEIKAQKKAQSSTDSGGSSGGSSGSETPGTSESATPESSGGSSGGSS
EVEFSHEYWMRHALTLAKRAWDEREVPVGAVLVLNNRVIGEGWNRSIGLH
DPTAHAEIMALRQGGLVMQNYRLIDATLYVTFEPCVMCAGAMIHSRIGRV
VFGVRNAKTGAAGSLMDVLHYPGMNHRVEITEGILADECNALLCYFFRMR
RQVFNAQKKAQSSTDSGGSSGGSSGSETPGTSESATPESSGGSSGGSDKK
YSIGLAIGTNSVGWAVITDEYKVPSKKFKVLGNTDRHSIKKNLIGALLFD
SGETAEATRLKRTARRRYTRRKNRICYLQEIFSNEMAKVDDSFFHRLEES
FLVEEDKKHERHPIFGNIVDEVAYHEKYPTIYHLRKKLVDSTDKADLRLI
YLALAHMIKFRGHFLIEGDLNPDNSDVDKLFIQLVQTYNQLFEENPINAS
GVDAKAILSARLSKSRRLENLIAQLPGEKKNGLFGNLIALSLGLTPNFKS
NFDLAEDAKLQLSKDTYDDDLDNLLAQIGDQYADLFLAAKNLSDAILLSD
ILRVNTEITKAPLSASMIKRYDEHHQDLTLLKALVRQQLPEKYKEIFFDQ
SKNGYAGYIDGGASQEEFYKFIKPILEKMDGTEELLVKLNREDLLRKQRT
FDNGSIPHQIHLGELHAILRRQEDFYPFLKDNREKIEKILTFRIPYYVGP
LARGNSRFAWMTRKSEETITPWNFEEVVDKGASAQSFIERMTNFDKNLPN
EKVLPKHSLLYEYFTVYNELTKVKYVTEGMRKPAFLSGEQKKAIVDLLFK
TNRKVTVKQLKEDYFKKIECFDSVEISGVEDRFNASLGTYHDLLKIIKDK
DFLDNEENEDILEDIVLTLTLFEDREMIEERLKTYAHLFDDKVMKQLKRR
RYTGWGRLSRKLINGIRDKQSGKTILDFLKSDGFANRNFMQLIHDDSLTF
KEDIQKAQVSGQGDSLHEHIANLAGSPAIKKGILQTVKVVDELVKVMGRH
KPENIVIEMARENQTTQKGQKNSRERMKRIEEGIKELGSQILKEHPVENT
QLQNEKLYLYYLQNGRDMYVDQELDINRLSDYDVDHIVPQSFLKDDSIDN
KVLTRSDKNRGKSDNVPSEEVVKKMKNYWRQLLNAKLITQRKFDNLTKAE
RGGLSELDKAGFIKRQLVETRQITKHVAQILDSRMNTKYDENDKLIREVK
VITLKSKLVSDFRKDFQFYKVREINNYHHAHDAYLNAVVGTALIKKYPKL
ESEFVYGDYKVYDVRKMIAKSEQEIGKATAKYFFYSNIMNFFKTEITLAN
GEIRKRPLIETNGETGEIVWDKGRDFATVRKVLSMPQVNIVKKTEVQTGG
FSKESILPKRNSDKLIARKKDWDPKKYGGFDSPTVAYSVLVVAKVEKGKS
KKLKSVKELLGITIMERSSFEKNPIDFLEAKGYKEVKKDLIIKLPKYSLF
ELENGRKRMLASAGELQKGNELALPSKYVNFLYLASHYEKLKGSPEDNEQ
KQLFVEQHKHYLDEIIEQISEFSKRVILADANLDKVLSAYNKHRDKPIRE
QAENIIHLFTLTNLGAPAAFKYFDTTIDRKRYTSTKEVLDATLIHQSITG
LYETRIDLSQLGGDSGGSPKKKRKV
pNMG-586
ecTadA_{(wild-type)}-(SGGS)₂-XTEN-(SGGS)₂-
ecTadA_{(H36L}_P48A_R51L_L84F_A106V_D108N_
_{H123Y}_S146C_D147Y_E155V_I156F_K157N-
(SGGS)₂-XTEN-(SGGS)₂_nCas9_GGS_NLS
(SEQ ID NO: 187)
MSEVEFSHEYWMRHALTLAKRAWDEREVPVGAVLVHNNRVIGEGWNRPIG
RHDPTAHAEIMALRQGGLVMQNYRLIDATLYVTLEPCVMCAGAMIHSRIG
RVVFGARDAKTGAAGSLMDVLHHPGMNHRVEITEGILADECAALLSDFFR
MRRQEIKAQKKAQSSTDSGGSSGGSSGSETPGTSESATPESSGGSSGGSS
EVEFSHEYWMRHALTLAKRAWDEREVPVGAVLVLNNRVIGEGWNRAIGLH
DPTAHAEIMALRQGGLVMQNYRLIDATLYVTFEPCVMCAGAMIHSRIGRV
VFGVRNAKTGAAGSLMDVLHYPGMNHRVEITEGILADECAALLCYFFRMR
RQVFNAQKKAQSSTDSGGSSGGSSGSETPGTSESATPESSGGSSGGSDKK
YSIGLAIGTNSVGWAVITDEYKVPSKKFKVLGNTDRHSIKKNLIGALLFD
SGETAEATRLKRTARRRYTRRKNRICYLQEIFSNEMAKVDDSFFHRLEES
FLVEEDKKHERHPIFGNIVDEVAYHEKYPTIYHLRKKLVDSTDKADLRLI
YLALAHMIKFRGHFLIEGDLNPDNSDVDKLFIQLVQTYNQLFEENPINAS
GVDAKAILSARLSKSRRLENLIAQLPGEKKNGLFGNLIALSLGLTPNFKS
NFDLAEDAKLQLSKDTYDDDLDNLLAQIGDQYADLFLAAKNLSDAILLSD
ILRVNTEITKAPLSASMIKRYDEHHQDLTLLKALVRQQLPEKYKEIFFDQ
SKNGYAGYIDGGASQEEFYKFIKPILEKMDGTEELLVKLNREDLLRKQRT
FDNGSIPHQIHLGELHAILRRQEDFYPFLKDNREKIEKILTFRIPYYVGP
LARGNSRFAWMTRKSEETITPWNFEEVVDKGASAQSFIERMTNFDKNLPN
EKVLPKHSLLYEYFTVYNELTKVKYVTEGMRKPAFLSGEQKKAIVDLLFK
TNRKVTVKQLKEDYFKKIECFDSVEISGVEDRFNASLGTYHDLLKIIKDK
DFLDNEENEDILEDIVLTLTLFEDREMIEERLKTYAHLFDDKVMKQLKRR
RYTGWGRLSRKLINGIRDKQSGKTILDFLKSDGFANRNFMQLIHDDSLTF
KEDIQKAQVSGQGDSLHEHIANLAGSPAIKKGILQTVKVVDELVKVMGRH
KPENIVIEMARENQTTQKGQKNSRERMKRIEEGIKELGSQILKEHPVENT
QLQNEKLYLYYLQNGRDMYVDQELDINRLSDYDVDHIVPQSFLKDDSIDN
KVLTRSDKNRGKSDNVPSEEVVKKMKNYWRQLLNAKLITQRKFDNLTKAE
RGGLSELDKAGFIKRQLVETRQITKHVAQILDSRMNTKYDENDKLIREVK
VITLKSKLVSDFRKDFQFYKVREINNYHHAHDAYLNAVVGTALIKKYPKL
ESEFVYGDYKVYDVRKMIAKSEQEIGKATAKYFFYSNIMNFFKTEITLAN
GEIRKRPLIETNGETGEIVWDKGRDFATVRKVLSMPQVNIVKKTEVQTGG
FSKESILPKRNSDKLIARKKDWDPKKYGGFDSPTVAYSVLVVAKVEKGKS
KKLKSVKELLGITIMERSSFEKNPIDFLEAKGYKEVKKDLIIKLPKYSLF
ELENGRKRMLASAGELQKGNELALPSKYVNFLYLASHYEKLKGSPEDNEQ
KQLFVEQHKHYLDEIIEQISEFSKRVILADANLDKVLSAYNKHRDKPIRE
QAENIIHLFTLTNLGAPAAFKYFDTTIDRKRYTSTKEVLDATLIHQSITG
LYETRIDLSQLGGDSGGSPKKKRKV
ABE7.2
ecTadA_{(wild-type)}-(SGGS)₂-XTEN-(SGGS)₂-
ecTadA_{(H36L}_P48A_R51L_L84F_A106V_D108N_
_{H123Y}_A142N_S146C_D147Y_E155V_I156F_K157N)-
(SGGS)₂-XTEN-(SGGS)₂_nCas9_GGS_NLS
(SEQ ID NO: 188)
MSEVEFSHEYWMRHALTLAKRAWDEREVPVGAVLVHNNRVIGEGWNRPIG
RHDPTAHAEIMALRQGGLVMQNYRLIDATLYVTLEPCVMCAGAMIHSRIG
RVVFGARDAKTGAAGSLMDVLHHPGMNHRVEITEGILADECAALLSDFFR
MRRQEIKAQKKAQSSTDSGGSSGGSSGSETPGTSESATPESSGGSSGGSS
EVEFSHEYWMRHALTLAKRAWDEREVPVGAVLVLNNRVIGEGWNRAIGLH
DPTAHAEIMALRQGGLVMQNYRLIDATLYVTFEPCVMCAGAMIHSRIGRV
VFGVRNAKTGAAGSLMDVLHYPGMNHRVEITEGILADECNALLCYFFRMR
RQVFNAQKKAQSSTDSGGSSGGSSGSETPGTSESATPESSGGSSGGSDKK
YSIGLAIGTNSVGWAVITDEYKVPSKKFKVLGNTDRHSIKKNLIGALLFD
SGETAEATRLKRTARRRYTRRKNRICYLQEIFSNEMAKVDDSFFHRLEES
FLVEEDKKHERHPIFGNIVDEVAYHEKYPTIYHLRKKLVDSTDKADLRLI
YLALAHMIKFRGHFLIEGDLNPDNSDVDKLFIQLVQTYNQLFEENPINAS
GVDAKAILSARLSKSRRLENLIAQLPGEKKNGLFGNLIALSLGLTPNFKS
NFDLAEDAKLQLSKDTYDDDLDNLLAQIGDQYADLFLAAKNLSDAILLSD
ILRVNTEITKAPLSASMIKRYDEHHQDLTLLKALVRQQLPEKYKEIFFDQ
SKNGYAGYIDGGASQEEFYKFIKPILEKMDGTEELLVKLNREDLLRKQRT
FDNGSIPHQIHLGELHAILRRQEDFYPFLKDNREKIEKILTFRIPYYVGP
LARGNSRFAWMTRKSEETITPWNFEEVVDKGASAQSFIERMTNFDKNLPN
EKVLPKHSLLYEYFTVYNELTKVKYVTEGMRKPAFLSGEQKKAIVDLLFK
TNRKVTVKQLKEDYFKKIECFDSVEISGVEDRFNASLGTYHDLLKIIKDK
DFLDNEENEDILEDIVLTLTLFEDREMIEERLKTYAHLFDDKVMKQLKRR
RYTGWGRLSRKLINGIRDKQSGKTILDFLKSDGFANRNFMQLIHDDSLTF
KEDIQKAQVSGQGDSLHEHIANLAGSPAIKKGILQTVKVVDELVKVMGRH
KPENIVIEMARENQTTQKGQKNSRERMKRIEEGIKELGSQILKEHPVENT
QLQNEKLYLYYLQNGRDMYVDQELDINRLSDYDVDHIVPQSFLKDDSIDN
KVLTRSDKNRGKSDNVPSEEVVKKMKNYWRQLLNAKLITQRKFDNLTKAE
RGGLSELDKAGFIKRQLVETRQITKHVAQILDSRMNTKYDENDKLIREVK
VITLKSKLVSDFRKDFQFYKVREINNYHHAHDAYLNAVVGTALIKKYPKL
ESEFVYGDYKVYDVRKMIAKSEQEIGKATAKYFFYSNIMNFFKTEITLAN
GEIRKRPLIETNGETGEIVWDKGRDFATVRKVLSMPQVNIVKKTEVQTGG
FSKESILPKRNSDKLIARKKDWDPKKYGGFDSPTVAYSVLVVAKVEKGKS
KKLKSVKELLGITIMERSSFEKNPIDFLEAKGYKEVKKDLIIKLPKYSLF
ELENGRKRMLASAGELQKGNELALPSKYVNFLYLASHYEKLKGSPEDNEQ
KQLFVEQHKHYLDEIIEQISEFSKRVILADANLDKVLSAYNKHRDKPIRE
QAENIIHLFTLTNLGAPAAFKYFDTTIDRKRYTSTKEVLDATLIHQSITG
LYETRIDLSQLGGDSGGSPKKKRKV
pNMG-620
ecTadA_{(wild-type)}-(SGGS)₂-XTEN-(SGGS)₂-
ecTadA_{(W23R}_H36L_P48A_R51L_L84F_A106V_
_{D108N}_H123Y_S146C_D147Y_R152P_E155V_
_{I156F K157N)}-(SGGS)₂-XTEN-(SGGS)₂_
nCas9_GGS_NLS
(SEQ ID NO: 189)
MSEVEFSHEYWMRHALTLAKRAWDEREVPVGAVLVHNNRVIGEGWNRPIG
RHDPTAHAEIMALRQGGLVMQNYRLIDATLYVTLEPCVMCAGAMIHSRIG
RVVFGARDAKTGAAGSLMDVLHHPGMNHRVEITEGILADECAALLSDFFR
MRRQEIKAQKKAQSSTDSGGSSGGSSGSETPGTSESATPESSGGSSGGSS
EVEFSHEYWMRHALTLAKRARDEREVPVGAVLVLNNRVIGEGWNRAIGLH
DPTAHAEIMALRQGGLVMQNYRLIDATLYVTFEPCVMCAGAMIHSRIGRV
VFGVRNAKTGAAGSLMDVLHYPGMNHRVEITEGILADECAALLCYFFRMP
RQVFNAQKKAQSSTDSGGSSGGSSGSETPGTSESATPESSGGSSGGSDKK
YSIGLAIGTNSVGWAVITDEYKVPSKKFKVLGNTDRHSIKKNLIGALLFD
SGETAEATRLKRTARRRYTRRKNRICYLQEIFSNEMAKVDDSFFHRLEES
FLVEEDKKHERHPIFGNIVDEVAYHEKYPTIYHLRKKLVDSTDKADLRLI
YLALAHMIKFRGHFLIEGDLNPDNSDVDKLFIQLVQTYNQLFEENPINAS
GVDAKAILSARLSKSRRLENLIAQLPGEKKNGLFGNLIALSLGLTPNFKS
NFDLAEDAKLQLSKDTYDDDLDNLLAQIGDQYADLFLAAKNLSDAILLSD
ILRVNTEITKAPLSASMIKRYDEHHQDLTLLKALVRQQLPEKYKEIFFDQ
SKNGYAGYIDGGASQEEFYKFIKPILEKMDGTEELLVKLNREDLLRKQRT
FDNGSIPHQIHLGELHAILRRQEDFYPFLKDNREKIEKILTFRIPYYVGP
LARGNSRFAWMTRKSEETITPWNFEEVVDKGASAQSFIERMTNFDKNLPN
EKVLPKHSLLYEYFTVYNELTKVKYVTEGMRKPAFLSGEQKKAIVDLLFK
TNRKVTVKQLKEDYFKKIECFDSVEISGVEDRFNASLGTYHDLLKIIKDK
DFLDNEENEDILEDIVLTLTLFEDREMIEERLKTYAHLFDDKVMKQLKRR
RYTGWGRLSRKLINGIRDKQSGKTILDFLKSDGFANRNFMQLIHDDSLTF
KEDIQKAQVSGQGDSLHEHIANLAGSPAIKKGILQTVKVVDELVKVMGRH
KPENIVIEMARENQTTQKGQKNSRERMKRIEEGIKELGSQILKEHPVENT
QLQNEKLYLYYLQNGRDMYVDQELDINRLSDYDVDHIVPQSFLKDDSIDN
KVLTRSDKNRGKSDNVPSEEVVKKMKNYWRQLLNAKLITQRKFDNLTKAE
RGGLSELDKAGFIKRQLVETRQITKHVAQILDSRMNTKYDENDKLIREVK
VITLKSKLVSDFRKDFQFYKVREINNYHHAHDAYLNAVVGTALIKKYPKL
ESEFVYGDYKVYDVRKMIAKSEQEIGKATAKYFFYSNIMNFFKTEITLAN
GEIRKRPLIETNGETGEIVWDKGRDFATVRKVLSMPQVNIVKKTEVQTGG
FSKESILPKRNSDKLIARKKDWDPKKYGGFDSPTVAYSVLVVAKVEKGKS
KKLKSVKELLGITIMERSSFEKNPIDFLEAKGYKEVKKDLIIKLPKYSLF
ELENGRKRMLASAGELQKGNELALPSKYVNFLYLASHYEKLKGSPEDNEQ
KQLFVEQHKHYLDEIIEQISEFSKRVILADANLDKVLSAYNKHRDKPIRE
QAENIIHLFTLTNLGAPAAFKYFDTTIDRKRYTSTKEVLDATLIHQSITG
LYETRIDLSQLGGDSGGSPKKKRKV
pNMG-617
ecTadA(wild-type)-(SGGS)₂-XTEN-(SGGS)₂-
ecTadA(W23L_H36L_P48A_R51L_L84F_A106V_
D108N_H123Y_A142A_S146C_D147Y_E155V_
I156F_K157N)-(SGGS)₂-XTEN-(SGGS)₂_
nCas9_GGS_NLS
(SEQ ID NO: 190)
MSEVEFSHEYWMRHALTLAKRAWDEREVPVGAVLVHNNRVIGEGWNRPIG
RHDPTAHAEIMALRQGGLVMQNYRLIDATLYVTLEPCVMCAGAMIHSRIG
RVVFGARDAKTGAAGSLMDVLHHPGMNHRVEITEGILADECAALLSDFFR
MRRQEIKAQKKAQSSTDSGGSSGGSSGSETPGTSESATPESSGGSSGGSS
EVEFSHEYWMRHALTLAKRALDEREVPVGAVLVLNNRVIGEGWNRAIGLH
DPTAHAEIMALRQGGLVMQNYRLIDATLYVTFEPCVMCAGAMIHSRIGRV
VFGVRNAKTGAAGSLMDVLHYPGMNHRVEITEGILADECNALLCYFFRMR
RQVFNAQKKAQSSTDSGGSSGGSSGSETPGTSESATPESSGGSSGGSDKK
YSIGLAIGTNSVGWAVITDEYKVPSKKFKVLGNTDRHSIKKNLIGALLFD
SGETAEATRLKRTARRRYTRRKNRICYLQEIFSNEMAKVDDSFFHRLEES
FLVEEDKKHERHPIFGNIVDEVAYHEKYPTIYHLRKKLVDSTDKADLRLI
YLALAHMIKFRGHFLIEGDLNPDNSDVDKLFIQLVQTYNQLFEENPINAS
GVDAKAILSARLSKSRRLENLIAQLPGEKKNGLFGNLIALSLGLTPNFKS
NFDLAEDAKLQLSKDTYDDDLDNLLAQIGDQYADLFLAAKNLSDAILLSD
ILRVNTEITKAPLSASMIKRYDEHHQDLTLLKALVRQQLPEKYKEIFFDQ
SKNGYAGYIDGGASQEEFYKFIKPILEKMDGTEELLVKLNREDLLRKQRT
FDNGSIPHQIHLGELHAILRRQEDFYPFLKDNREKIEKILTFRIPYYVGP
LARGNSRFAWMTRKSEETITPWNFEEVVDKGASAQSFIERMTNFDKNLPN
EKVLPKHSLLYEYFTVYNELTKVKYVTEGMRKPAFLSGEQKKAIVDLLFK
TNRKVTVKQLKEDYFKKIECFDSVEISGVEDRFNASLGTYHDLLKIIKDK
DFLDNEENEDILEDIVLTLTLFEDREMIEERLKTYAHLFDDKVMKQLKRR
RYTGWGRLSRKLINGIRDKQSGKTILDFLKSDGFANRNFMQLIHDDSLTF
KEDIQKAQVSGQGDSLHEHIANLAGSPAIKKGILQTVKVVDELVKVMGRH
KPENIVIEMARENQTTQKGQKNSRERMKRIEEGIKELGSQILKEHPVENT
QLQNEKLYLYYLQNGRDMYVDQELDINRLSDYDVDHIVPQSFLKDDSIDN
KVLTRSDKNRGKSDNVPSEEVVKKMKNYWRQLLNAKLITQRKFDNLTKAE
RGGLSELDKAGFIKRQLVETRQITKHVAQILDSRMNTKYDENDKLIREVK
VITLKSKLVSDFRKDFQFYKVREINNYHHAHDAYLNAVVGTALIKKYPKL
ESEFVYGDYKVYDVRKMIAKSEQEIGKATAKYFFYSNIMNFFKTEITLAN
GEIRKRPLIETNGETGEIVWDKGRDFATVRKVLSMPQVNIVKKTEVQTGG
FSKESILPKRNSDKLIARKKDWDPKKYGGFDSPTVAYSVLVVAKVEKGKS
KKLKSVKELLGITIMERSSFEKNPIDFLEAKGYKEVKKDLIIKLPKYSLF
ELENGRKRMLASAGELQKGNELALPSKYVNFLYLASHYEKLKGSPEDNEQ
KQLFVEQHKHYLDEIIEQISEFSKRVILADANLDKVLSAYNKHRDKPIRE
QAENIIHLFTLTNLGAPAAFKYFDTTIDRKRYTSTKEVLDATLIHQSITG
LYETRIDLSQLGGDSGGSPKKKRKV
pNMG-618
ecTadA_{(wild-type)}-(SGGS)₂-XTEN-(SGGS)₂-
ecTadA_{(W23L}_H36L_P48A_R51L_L84F_A106V_
_{D108N}_H123Y_A142A_S146C_D147Y_R152P_
_{E155V}_I156F_K157N)-(SGGS)₂-XTEN-
(SGGS)₂_nCas9_GGS_NLS
(SEQ ID NO: 191)
MSEVEFSHEYWMRHALTLAKRAWDEREVPVGAVLVHNNRVIGEGWNRPIG
RHDPTAHAEIMALRQGGLVMQNYRLIDATLYVTLEPCVMCAGAMIHSRIG
RVVFGARDAKTGAAGSLMDVLHHPGMNHRVEITEGILADECAALLSDFFR
MRRQEIKAQKKAQSSTDSGGSSGGSSGSETPGTSESATPESSGGSSGGSS
EVEFSHEYWMRHALTLAKRALDEREVPVGAVLVLNNRVIGEGWNRAIGLH
DPTAHAEIMALRQGGLVMQNYRLIDATLYVTFEPCVMCAGAMIHSRIGRV
VFGVRNAKTGAAGSLMDVLHYPGMNHRVEITEGILADECNALLCYFFRMP
RQVFNAQKKAQSSTDSGGSSGGSSGSETPGTSESATPESSGGSSGGSDKK
YSIGLAIGTNSVGWAVITDEYKVPSKKFKVLGNTDRHSIKKNLIGALLFD
SGETAEATRLKRTARRRYTRRKNRICYLQEIFSNEMAKVDDSFFHRLEES
FLVEEDKKHERHPIFGNIVDEVAYHEKYPTIYHLRKKLVDSTDKADLRLI
YLALAHMIKFRGHFLIEGDLNPDNSDVDKLFIQLVQTYNQLFEENPINAS
GVDAKAILSARLSKSRRLENLIAQLPGEKKNGLFGNLIALSLGLTPNFKS
NFDLAEDAKLQLSKDTYDDDLDNLLAQIGDQYADLFLAAKNLSDAILLSD
ILRVNTEITKAPLSASMIKRYDEHHQDLTLLKALVRQQLPEKYKEIFFDQ
SKNGYAGYIDGGASQEEFYKFIKPILEKMDGTEELLVKLNREDLLRKQRT
FDNGSIPHQIHLGELHAILRRQEDFYPFLKDNREKIEKILTFRIPYYVGP
LARGNSRFAWMTRKSEETITPWNFEEVVDKGASAQSFIERMTNFDKNLPN
EKVLPKHSLLYEYFTVYNELTKVKYVTEGMRKPAFLSGEQKKAIVDLLFK
TNRKVTVKQLKEDYFKKIECFDSVEISGVEDRFNASLGTYHDLLKIIKDK
DFLDNEENEDILEDIVLTLTLFEDREMIEERLKTYAHLFDDKVMKQLKRR
RYTGWGRLSRKLINGIRDKQSGKTILDFLKSDGFANRNFMQLIHDDSLTF
KEDIQKAQVSGQGDSLHEHIANLAGSPAIKKGILQTVKVVDELVKVMGRH
KPENIVIEMARENQTTQKGQKNSRERMKRIEEGIKELGSQILKEHPVENT
QLQNEKLYLYYLQNGRDMYVDQELDINRLSDYDVDHIVPQSFLKDDSIDN
KVLTRSDKNRGKSDNVPSEEVVKKMKNYWRQLLNAKLITQRKFDNLTKAE
RGGLSELDKAGFIKRQLVETRQITKHVAQILDSRMNTKYDENDKLIREVK
VITLKSKLVSDFRKDFQFYKVREINNYHHAHDAYLNAVVGTALIKKYPKL
ESEFVYGDYKVYDVRKMIAKSEQEIGKATAKYFFYSNIMNFFKTEITLAN
GEIRKRPLIETNGETGEIVWDKGRDFATVRKVLSMPQVNIVKKTEVQTGG
FSKESILPKRNSDKLIARKKDWDPKKYGGFDSPTVAYSVLVVAKVEKGKS
KKLKSVKELLGITIMERSSFEKNPIDFLEAKGYKEVKKDLIIKLPKYSLF
ELENGRKRMLASAGELQKGNELALPSKYVNFLYLASHYEKLKGSPEDNEQ
KQLFVEQHKHYLDEIIEQISEFSKRVILADANLDKVLSAYNKHRDKPIRE
QAENIIHLFTLTNLGAPAAFKYFDTTIDRKRYTSTKEVLDATLIHQSITG
LYETRIDLSQLGGDSGGSPKKKRKV
pNMG-620
ecTadA_{(wild-type)}-(SGGS)₂-XTEN-(SGGS)₂-
ecTadA_{(W23R}_H36L_P48A_R51L_L84F_A106V_D108N_
_{H123Y}_S146C_D147Y_R152P_E155V_I156F_K157N)-
(SGGS)₂-XTEN-(SGGS)₂_nCas9_GGS_NLS
(SEQ ID NO: 192)
MSEVEFSHEYWMRHALTLAKRAWDEREVPVGAVLVHNNRVIGEGWNRPIG
RHDPTAHAEIMALRQGGLVMQNYRLIDATLYVTLEPCVMCAGAMIHSRIG
RVVFGARDAKTGAAGSLMDVLHHPGMNHRVEITEGILADECAALLSDFFR
MRRQEIKAQKKAQSSTDSGGSSGGSSGSETPGTSESATPESSGGSSGGSS
EVEFSHEYWMRHALTLAKRARDEREVPVGAVLVLNNRVIGEGWNRAIGLH
DPTAHAEIMALRQGGLVMQNYRLIDATLYVTFEPCVMCAGAMIHSRIGRV
VFGVRNAKTGAAGSLMDVLHYPGMNHRVEITEGILADECAALLCYFFRMP
RQVFNAQKKAQSSTDSGGSSGGSSGSETPGTSESATPESSGGSSGGSDKK
YSIGLAIGTNSVGWAVITDEYKVPSKKFKVLGNTDRHSIKKNLIGALLFD
SGETAEATRLKRTARRRYTRRKNRICYLQEIFSNEMAKVDDSFFHRLEES
FLVEEDKKHERHPIFGNIVDEVAYHEKYPTIYHLRKKLVDSTDKADLRLI
YLALAHMIKFRGHFLIEGDLNPDNSDVDKLFIQLVQTYNQLFEENPINAS
GVDAKAILSARLSKSRRLENLIAQLPGEKKNGLFGNLIALSLGLTPNFKS
NFDLAEDAKLQLSKDTYDDDLDNLLAQIGDQYADLFLAAKNLSDAILLSD
ILRVNTEITKAPLSASMIKRYDEHHQDLTLLKALVRQQLPEKYKEIFFDQ
SKNGYAGYIDGGASQEEFYKFIKPILEKMDGTEELLVKLNREDLLRKQRT
FDNGSIPHQIHLGELHAILRRQEDFYPFLKDNREKIEKILTFRIPYYVGP
LARGNSRFAWMTRKSEETITPWNFEEVVDKGASAQSFIERMTNFDKNLPN
EKVLPKHSLLYEYFTVYNELTKVKYVTEGMRKPAFLSGEQKKAIVDLLFK
TNRKVTVKQLKEDYFKKIECFDSVEISGVEDRFNASLGTYHDLLKIIKDK
DFLDNEENEDILEDIVLTLTLFEDREMIEERLKTYAHLFDDKVMKQLKRR
RYTGWGRLSRKLINGIRDKQSGKTILDFLKSDGFANRNFMQLIHDDSLTF
KEDIQKAQVSGQGDSLHEHIANLAGSPAIKKGILQTVKVVDELVKVMGRH
KPENIVIEMARENQTTQKGQKNSRERMKRIEEGIKELGSQILKEHPVENT
QLQNEKLYLYYLQNGRDMYVDQELDINRLSDYDVDHIVPQSFLKDDSIDN
KVLTRSDKNRGKSDNVPSEEVVKKMKNYWRQLLNAKLITQRKFDNLTKAE
RGGLSELDKAGFIKRQLVETRQITKHVAQILDSRMNTKYDENDKLIREVK
VITLKSKLVSDFRKDFQFYKVREINNYHHAHDAYLNAVVGTALIKKYPKL
ESEFVYGDYKVYDVRKMIAKSEQEIGKATAKYFFYSNIMNFFKTEITLAN
GEIRKRPLIETNGETGEIVWDKGRDFATVRKVLSMPQVNIVKKTEVQTGG
FSKESILPKRNSDKLIARKKDWDPKKYGGFDSPTVAYSVLVVAKVEKGKS
KKLKSVKELLGITIMERSSFEKNPIDFLEAKGYKEVKKDLIIKLPKYSLF
ELENGRKRMLASAGELQKGNELALPSKYVNFLYLASHYEKLKGSPEDNEQ
KQLFVEQHKHYLDEIIEQISEFSKRVILADANLDKVLSAYNKHRDKPIRE
QAENIIHLFTLTNLGAPAAFKYFDTTIDRKRYTSTKEVLDATLIHQSITG
LYETRIDLSQLGGDSGGSPKKKRKV
pNMG-621
ecTadA_{(wild-type)}-32 a.a. linker-
ecTadA_{(H36L}_P48A_R51L_L84F_A106V_
_{D108N}_H123Y_S146C_D147Y_R152P_
_{E155V}_H56F_K157N)-24 a.a. linker_
nCas9_GGS_NLS
(SEQ ID NO: 193)
MSEVEFSHEYWMRHALTLAKRAWDEREVPVGAVLVHNNRVIGEGWNRPIG
RHDPTAHAEIMALRQGGLVMQNYRLIDATLYVTLEPCVMCAGAMIHSRIG
RVVFGARDAKTGAAGSLMDVLHHPGMNHRVEITEGILADECAALLSDFFR
MRRQEIKAQKKAQSSTDSGGSSGGSSGSETPGTSESATPESSGGSSGGSS
EVEFSHEYWMRHALTLAKRAWDEREVPVGAVLVLNNRVIGEGWNRAIGLH
DPTAHAEIMALRQGGLVMQNYRLIDATLYVTFEPCVMCAGAMIHSRIGRV
VFGVRNAKTGAAGSLMDVLHYPGMNHRVEITEGILADECAALLCYFFRMP
RQVFNAQKKAQSSTDSGGSSGGSSGSETPGTSESATPESDKKYSIGLAIG
TNSVGWAVITDEYKVPSKKFKVLGNTDRHSIKKNLIGALLFDSGETAEAT
RLKRTARRRYTRRKNRICYLQEIFSNEMAKVDDSFFHRLEESFLVEEDKK
HERHPIFGNIVDEVAYHEKYPTIYHLRKKLVDSTDKADLRLIYLALAHMI
KFRGHFLIEGDLNPDNSDVDKLFIQLVQTYNQLFEENPINASGVDAKAIL
SARLSKSRRLENLIAQLPGEKKNGLFGNLIALSLGLTPNFKSNFDLAEDA
KLQLSKDTYDDDLDNLLAQIGDQYADLFLAAKNLSDAILLSDILRVNTEI
TKAPLSASMIKRYDEHHQDLTLLKALVRQQLPEKYKEIFFDQSKNGYAGY
IDGGASQEEFYKFIKPILEKMDGTEELLVKLNREDLLRKQRTFDNGSIPH
QIHLGELHAILRRQEDFYPFLKDNREKIEKILTFRIPYYVGPLARGNSRF
AWMTRKSEETITPWNFEEVVDKGASAQSFIERMTNFDKNLPNEKVLPKHS
LLYEYFTVYNELTKVKYVTEGMRKPAFLSGEQKKAIVDLLFKTNRKVTVK
QLKEDYFKKIECFDSVEISGVEDRFNASLGTYHDLLKIIKDKDFLDNEEN
EDILEDIVLTLTLFEDREMIEERLKTYAHLFDDKVMKQLKRRRYTGWGRL
SRKLINGIRDKQSGKTILDFLKSDGFANRNFMQLIHDDSLTFKEDIQKAQ
VSGQGDSLHEHIANLAGSPAIKKGILQTVKVVDELVKVMGRHKPENIVIE
MARENQTTQKGQKNSRERMKRIEEGIKELGSQILKEHPVENTQLQNEKLY
LYYLQNGRDMYVDQELDINRLSDYDVDHIVPQSFLKDDSIDNKVLTRSDK
NRGKSDNVPSEEVVKKMKNYWRQLLNAKLITQRKFDNLTKAERGGLSELD
KAGFIKRQLVETRQITKHVAQILDSRMNTKYDENDKLIREVKVITLKSKL
VSDFRKDFQFYKVREINNYHHAHDAYLNAVVGTALIKKYPKLESEFVYGD
YKVYDVRKMIAKSEQEIGKATAKYFFYSNIMNFFKTEITLANGEIRKRPL
IETNGETGEIVWDKGRDFATVRKVLSMPQVNIVKKTEVQTGGFSKESILP
KRNSDKLIARKKDWDPKKYGGFDSPTVAYSVLVVAKVEKGKSKKLKSVKE
LLGITIMERSSFEKNPIDFLEAKGYKEVKKDLIIKLPKYSLFELENGRKR
MLASAGELQKGNELALPSKYVNFLYLASHYEKLKGSPEDNEQKQLFVEQH
KHYLDEIIEQISEFSKRVILADANLDKVLSAYNKHRDKPIREQAENIIHL
FTLTNLGAPAAFKYFDTTIDRKRYTSTKEVLDATLIHQSITGLYETRIDL
SQLGGDSGGSPKKKRKV
pNMG-622
ecTadA_{(wild-type)}-32 a.a. linker-
ecTadA_{(H36L}_P48A_R51L_L84F_A106V_
_{D108N}_H123Y_A142N_S146C_D147Y_
_{R152P}_E155V_H56F_K157N)-24 a.a.
linker_nCas9_GGS_NLS
(SEQ ID NO: 194)
MSEVEFSHEYWMRHALTLAKRAWDEREVPVGAVLVHNNRVIGEGWNRPIG
RHDPTAHAEIMALRQGGLVMQNYRLIDATLYVTLEPCVMCAGAMIHSRIG
RVVFGARDAKTGAAGSLMDVLHHPGMNHRVEITEGILADECAALLSDFFR
MRRQEIKAQKKAQSSTDSGGSSGGSSGSETPGTSESATPESSGGSSGGSS
EVEFSHEYWMRHALTLAKRAWDEREVPVGAVLVLNNRVIGEGWNRAIGLH
DPTAHAEIMALRQGGLVMQNYRLIDATLYVTFEPCVMCAGAMIHSRIGRV
VFGVRNAKTGAAGSLMDVLHYPGMNHRVEITEGILADECNALLCYFFRMP
RQVFNAQKKAQSSTDSGGSSGGSSGSETPGTSESATPESDKKYSIGLAIG
TNSVGWAVITDEYKVPSKKFKVLGNTDRHSIKKNLIGALLFDSGETAEAT
RLKRTARRRYTRRKNRICYLQEIFSNEMAKVDDSFFHRLEESFLVEEDKK
HERHPIFGNIVDEVAYHEKYPTIYHLRKKLVDSTDKADLRLIYLALAHMI
KFRGHFLIEGDLNPDNSDVDKLFIQLVQTYNQLFEENPINASGVDAKAIL
SARLSKSRRLENLIAQLPGEKKNGLFGNLIALSLGLTPNFKSNFDLAEDA
KLQLSKDTYDDDLDNLLAQIGDQYADLFLAAKNLSDAILLSDILRVNTEI
TKAPLSASMIKRYDEHHQDLTLLKALVRQQLPEKYKEIFFDQSKNGYAGY
IDGGASQEEFYKFIKPILEKMDGTEELLVKLNREDLLRKQRTFDNGSIPH
QIHLGELHAILRRQEDFYPFLKDNREKIEKILTFRIPYYVGPLARGNSRF
AWMTRKSEETITPWNFEEVVDKGASAQSFIERMTNFDKNLPNEKVLPKHS
LLYEYFTVYNELTKVKYVTEGMRKPAFLSGEQKKAIVDLLFKTNRKVTVK
QLKEDYFKKIECFDSVEISGVEDRFNASLGTYHDLLKIIKDKDFLDNEEN
EDILEDIVLTLTLFEDREMIEERLKTYAHLFDDKVMKQLKRRRYTGWGRL
SRKLINGIRDKQSGKTILDFLKSDGFANRNFMQLIHDDSLTFKEDIQKAQ
VSGQGDSLHEHIANLAGSPAIKKGILQTVKVVDELVKVMGRHKPENIVIE
MARENQTTQKGQKNSRERMKRIEEGIKELGSQILKEHPVENTQLQNEKLY
LYYLQNGRDMYVDQELDINRLSDYDVDHIVPQSFLKDDSIDNKVLTRSDK
NRGKSDNVPSEEVVKKMKNYWRQLLNAKLITQRKFDNLTKAERGGLSELD
KAGFIKRQLVETRQITKHVAQILDSRMNTKYDENDKLIREVKVITLKSKL
VSDFRKDFQFYKVREINNYHHAHDAYLNAVVGTALIKKYPKLESEFVYGD
YKVYDVRKMIAKSEQEIGKATAKYFFYSNIMNFFKTEITLANGEIRKRPL
IETNGETGEIVWDKGRDFATVRKVLSMPQVNIVKKTEVQTGGFSKESILP
KRNSDKLIARKKDWDPKKYGGFDSPTVAYSVLVVAKVEKGKSKKLKSVKE
LLGITIMERSSFEKNPIDFLEAKGYKEVKKDLIIKLPKYSLFELENGRKR
MLASAGELQKGNELALPSKYVNFLYLASHYEKLKGSPEDNEQKQLFVEQH
KHYLDEIIEQISEFSKRVILADANLDKVLSAYNKHRDKPIREQAENIIHL
FTLTNLGAPAAFKYFDTTIDRKRYTSTKEVLDATLIHQSITGLYETRIDL
SQLGGDSGGSPKKKRKV
pNMG-623
ecTadA_{(wild-type)}-32 a.a. linker-
ecTadA_{(W23L}_H36L_P48A_R51L_L84F_
_{A106V}_D108N_H123Y_S146C_D147Y_
_{R152P}_E155V_I156F_K157N)-24 a.a.
linker_nCas9_GGS_NLS
(SEQ ID NO: 195)
MSEVEFSHEYWMRHALTLAKRAWDEREVPVGAVLVHNNRVIGEGWNRPIG
RHDPTAHAEIMALRQGGLVMQNYRLIDATLYVTLEPCVMCAGAMIHSRIG
RVVFGARDAKTGAAGSLMDVLHHPGMNHRVEITEGILADECAALLSDFFR
MRRQEIKAQKKAQSSTDSGGSSGGSSGSETPGTSESATPESSGGSSGGSS
EVEFSHEYWMRHALTLAKRALDEREVPVGAVLVLNNRVIGEGWNRAIGLH
DPTAHAEIMALRQGGLVMQNYRLIDATLYVTFEPCVMCAGAMIHSRIGRV
VFGVRNAKTGAAGSLMDVLHYPGMNHRVEITEGILADECAALLCYFFRMP
RQVFNAQKKAQSSTDSGGSSGGSSGSETPGTSESATPESDKKYSIGLAIG
TNSVGWAVITDEYKVPSKKFKVLGNTDRHSIKKNLIGALLFDSGETAEAT
RLKRTARRRYTRRKNRICYLQEIFSNEMAKVDDSFFHRLEESFLVEEDKK
HERHPIFGNIVDEVAYHEKYPTIYHLRKKLVDSTDKADLRLIYLALAHMI
KFRGHFLIEGDLNPDNSDVDKLFIQLVQTYNQLFEENPINASGVDAKAIL
SARLSKSRRLENLIAQLPGEKKNGLFGNLIALSLGLTPNFKSNFDLAEDA
KLQLSKDTYDDDLDNLLAQIGDQYADLFLAAKNLSDAILLSDILRVNTEI
TKAPLSASMIKRYDEHHQDLTLLKALVRQQLPEKYKEIFFDQSKNGYAGY
IDGGASQEEFYKFIKPILEKMDGTEELLVKLNREDLLRKQRTFDNGSIPH
QIHLGELHAILRRQEDFYPFLKDNREKIEKILTFRIPYYVGPLARGNSRF
AWMTRKSEETITPWNFEEVVDKGASAQSFIERMTNFDKNLPNEKVLPKHS
LLYEYFTVYNELTKVKYVTEGMRKPAFLSGEQKKATVDLLFKTNRKVTVK
QLKEDYFKKIECFDSVEISGVEDRFNASLGTYHDLLKIIKDKDFLDNEEN
EDILEDIVLTLTLFEDREMIEERLKTYAHLFDDKVMKQLKRRRYTGWGRL
SRKLINGIRDKQSGKTILDFLKSDGFANRNFMQLIHDDSLTFKEDIQKAQ
VSGQGDSLHEHIANLAGSPAIKKGILQTVKVVDELVKVMGRHKPENIVIE
MARENQTTQKGQKNSRERMKRIEEGIKELGSQILKEHPVENTQLQNEKLY
LYYLQNGRDMYVDQELDINRLSDYDVDHIVPQSFLKDDSIDNKVLTRSDK
NRGKSDNVPSEEVVKKMKNYWRQLLNAKLITQRKFDNLTKAERGGLSELD
KAGFIKRQLVETRQITKHVAQILDSRMNTKYDENDKLIREVKVITLKSKL
VSDFRKDFQFYKVREINNYHHAHDAYLNAVVGTALIKKYPKLESEFVYGD
YKVYDVRKMIAKSEQEIGKATAKYFFYSNIMNFFKTEITLANGEIRKRPL
IETNGETGEIVWDKGRDFATVRKVLSMPQVNIVKKTEVQTGGFSKESILP
KRNSDKLIARKKDWDPKKYGGFDSPTVAYSVLVVAKVEKGKSKKLKSVKE
LLGITIMERSSFEKNPIDFLEAKGYKEVKKDLIIKLPKYSLFELENGRKR
MLASAGELQKGNELALPSKYVNFLYLASHYEKLKGSPEDNEQKQLFVEQH
KHYLDEIIEQISEFSKRVILADANLDKVLSAYNKHRDKPIREQAENIIHL
FTLTNLGAPAAFKYFDTTIDRKRYTSTKEVLDATLIHQSITGLYETRIDL
SQLGGDSGGSPKKKRKV
ABE6.3
ecTadA_{(wild-type)}-(SGGS)₂-XTEN-(SGGS)₂-
ecTadA_{(H36L}_P48S_R51L_L84F_A106V_D108N_
_{H123Y}_S146C_D147Y_E155V_I156F_K157N)-
(SGGS)₂-XTEN-(SGGS)₂_nCas9_SGGS₂_NLS
(SEQ ID NO: 196)
MSEVEFSHEYWMRHALTLAKRAWDEREVPVGAVLVHNNRVIGEGWNRPIG
RHDPTAHAEIMALRQGGLVMQNYRLIDATLYVTLEPCVMCAGAMIHSRIG
RVVFGARDAKTGAAGSLMDVLHHPGMNHRVEITEGILADECAALLSDFFR
MRRQEIKAQKKAQSSTDSGGSSGGSSGSETPGTSESATPESSGGSSGGSS
EVEFSHEYWMRHALTLAKRAWDEREVPVGAVLVLNNRVIGEGWNRSIGLH
DPTAHAEIMALRQGGLVMQNYRLIDATLYVTFEPCVMCAGAMIHSRIGRV
VFGVRNAKTGAAGSLMDVLHYPGMNHRVEITEGILADECAALLCYFFRMR
RQVFNAQKKAQSSTDSGGSSGGSSGSETPGTSESATPESSGGSSGGSDKK
YSIGLAIGTNSVGWAVITDEYKVPSKKFKVLGNTDRHSIKKNLIGALLFD
SGETAEATRLKRTARRRYTRRKNRICYLQEIFSNEMAKVDDSFFHRLEES
FLVEEDKKHERHPIFGNIVDEVAYHEKYPTIYHLRKKLVDSTDKADLRLI
YLALAHMIKFRGHFLIEGDLNPDNSDVDKLFIQLVQTYNQLFEENPINAS
GVDAKAILSARLSKSRRLENLIAQLPGEKKNGLFGNLIALSLGLTPNFKS
NFDLAEDAKLQLSKDTYDDDLDNLLAQIGDQYADLFLAAKNLSDAILLSD
ILRVNTEITKAPLSASMIKRYDEHHQDLTLLKALVRQQLPEKYKEIFFDQ
SKNGYAGYIDGGASQEEFYKFIKPILEKMDGTEELLVKLNREDLLRKQRT
FDNGSIPHQIHLGELHAILRRQEDFYPFLKDNREKIEKILTFRIPYYVGP
LARGNSRFAWMTRKSEETITPWNFEEVVDKGASAQSFIERMTNFDKNLPN
EKVLPKHSLLYEYFTVYNELTKVKYVTEGMRKPAFLSGEQKKAIVDLLFK
TNRKVTVKQLKEDYFKKIECFDSVEISGVEDRFNASLGTYHDLLKIIKDK
DFLDNEENEDILEDIVLTLTLFEDREMIEERLKTYAHLFDDKVMKQLKRR
RYTGWGRLSRKLINGIRDKQSGKTILDFLKSDGFANRNFMQLIHDDSLTF
KEDIQKAQVSGQGDSLHEHIANLAGSPAIKKGILQTVKVVDELVKVMGRH
KPENIVIEMARENQTTQKGQKNSRERMKRIEEGIKELGSQILKEHPVENT
QLQNEKLYLYYLQNGRDMYVDQELDINRLSDYDVDHIVPQSFLKDDSIDN
KVLTRSDKNRGKSDNVPSEEVVKKMKNYWRQLLNAKLITQRKFDNLTKAE
RGGLSELDKAGFIKRQLVETRQITKHVAQILDSRMNTKYDENDKLIREVK
VITLKSKLVSDFRKDFQFYKVREINNYHHAHDAYLNAVVGTALIKKYPKL
ESEFVYGDYKVYDVRKMIAKSEQEIGKATAKYFFYSNIMNFFKTEITLAN
GEIRKRPLIETNGETGEIVWDKGRDFATVRKVLSMPQVNIVKKTEVQTGG
FSKESILPKRNSDKLIARKKDWDPKKYGGFDSPTVAYSVLVVAKVEKGKS
KKLKSVKELLGITIMERSSFEKNPIDFLEAKGYKEVKKDLIIKLPKYSLF
ELENGRKRMLASAGELQKGNELALPSKYVNFLYLASHYEKLKGSPEDNEQ
KQLFVEQHKHYLDEIIEQISEFSKRVILADANLDKVLSAYNKHRDKPIRE
QAENIIHLFTLTNLGAPAAFKYFDTTIDRKRYTSTKEVLDATLIHQSITG
LYETRIDLSQLGGDSGGSPKKKRKV
ABE6.4
ecTadA_{(wild-type)}-(SGGS)₂-XTEN-(SGGS)₂-
ecTadA_{(H36L}_P48S_R51L_L84F_A106V_D108N_
_{H123Y}_A142N_S146C_D147Y_E155V_I156F_K157N)-
(SGGS)₂-XTEN-(SGGS)₂_nCas9_SGGS_NLS
(SEQ ID NO: 197)
MSEVEFSHEYWMRHALTLAKRAWDEREVPVGAVLVHNNRVIGEGWNRPIG
RHDPTAHAEIMALRQGGLVMQNYRLIDATLYVTLEPCVMCAGAMIHSRIG
RVVFGARDAKTGAAGSLMDVLHHPGMNHRVEITEGILADECAALLSDFFR
MRRQEIKAQKKAQSSTDSGGSSGGSSGSETPGTSESATPESSGGSSGGSS
EVEFSHEYWMRHALTLAKRAWDEREVPVGAVLVLNNRVIGEGWNRSIGLH
DPTAHAEIMALRQGGLVMQNYRLIDATLYVTFEPCVMCAGAMIHSRIGRV
VFGVRNAKTGAAGSLMDVLHYPGMNHRVEITEGILADECNALLCYFFRMR
RQVFNAQKKAQSSTDSGGSSGGSSGSETPGTSESATPESSGGSSGGSDKK
YSIGLAIGTNSVGWAVITDEYKVPSKKFKVLGNTDRHSIKKNLIGALLFD
SGETAEATRLKRTARRRYTRRKNRICYLQEIFSNEMAKVDDSFFHRLEES
FLVEEDKKHERHPIFGNIVDEVAYHEKYPTIYHLRKKLVDSTDKADLRLI
YLALAHMIKFRGHFLIEGDLNPDNSDVDKLFIQLVQTYNQLFEENPINAS
GVDAKAILSARLSKSRRLENLIAQLPGEKKNGLFGNLIALSLGLTPNFKS
NFDLAEDAKLQLSKDTYDDDLDNLLAQIGDQYADLFLAAKNLSDAILLSD
ILRVNTEITKAPLSASMIKRYDEHHQDLTLLKALVRQQLPEKYKEIFFDQ
SKNGYAGYIDGGASQEEFYKFIKPILEKMDGTEELLVKLNREDLLRKQRT
FDNGSIPHQIHLGELHAILRRQEDFYPFLKDNREKIEKILTFRIPYYVGP
LARGNSRFAWMTRKSEETITPWNFEEVVDKGASAQSFIERMTNFDKNLPN
EKVLPKHSLLYEYFTVYNELTKVKYVTEGMRKPAFLSGEQKKAIVDLLFK
TNRKVTVKQLKEDYFKKIECFDSVEISGVEDRFNASLGTYHDLLKIIKDK
DFLDNEENEDILEDIVLTLTLFEDREMIEERLKTYAHLFDDKVMKQLKRR
RYTGWGRLSRKLINGIRDKQSGKTILDFLKSDGFANRNFMQLIHDDSLTF
KEDIQKAQVSGQGDSLHEHIANLAGSPAIKKGILQTVKVVDELVKVMGRH
KPENIVIEMARENQTTQKGQKNSRERMKRIEEGIKELGSQILKEHPVENT
QLQNEKLYLYYLQNGRDMYVDQELDINRLSDYDVDHIVPQSFLKDDSIDN
KVLTRSDKNRGKSDNVPSEEVVKKMKNYWRQLLNAKLITQRKFDNLTKAE
RGGLSELDKAGFIKRQLVETRQITKHVAQILDSRMNTKYDENDKLIREVK
VITLKSKLVSDFRKDFQFYKVREINNYHHAHDAYLNAVVGTALIKKYPKL
ESEFVYGDYKVYDVRKMIAKSEQEIGKATAKYFFYSNIMNFFKTEITLAN
GEIRKRPLIETNGETGEIVWDKGRDFATVRKVLSMPQVNIVKKTEVQTGG
FSKESILPKRNSDKLIARKKDWDPKKYGGFDSPTVAYSVLVVAKVEKGKS
KKLKSVKELLGITIMERSSFEKNPIDFLEAKGYKEVKKDLIIKLPKYSLF
ELENGRKRMLASAGELQKGNELALPSKYVNFLYLASHYEKLKGSPEDNEQ
KQLFVEQHKHYLDEIIEQISEFSKRVILADANLDKVLSAYNKHRDKPIRE
QAENIIHLFTLTNLGAPAAFKYFDTTIDRKRYTSTKEVLDATLIHQSITG
LYETRIDLSQLGGDSGGSPKKKRKV
ABE7.8
ecTadA_{(wild-type)}-(SGGS)₂-XTEN-(SGGS)₂-
ecTadA_{(W23L}_H36L_P48A_R51L_L84F_A106V_
_{D108N}_H123Y_A142N_S146C_D147Y_E155V_
_{I156F}_K157N)-(SGGS)₂-XTEN-(SGGS)₂_
nCas9_SGGS_NLS
(SEQ ID NO: 198)
MSEVEFSHEYWMRHALTLAKRAWDEREVPVGAVLVHNNRVIGEGWNRPIG
RHDPTAHAEIMALRQGGLVMQNYRLIDATLYVTLEPCVMCAGAMIHSRIG
RVVFGARDAKTGAAGSLMDVLHHPGMNHRVEITEGILADECAALLSDFFR
MRRQEIKAQKKAQSSTDSGGSSGGSSGSETPGTSESATPESSGGSSGGSS
EVEFSHEYWMRHALTLAKRALDEREVPVGAVLVLNNRVIGEGWNRAIGLH
DPTAHAEIMALRQGGLVMQNYRLIDATLYVTFEPCVMCAGAMIHSRIGRV
VFGVRNAKTGAAGSLMDVLHYPGMNHRVEITEGILADECNALLCYFFRMR
RQVFNAQKKAQSSTDSGGSSGGSSGSETPGTSESATPESSGGSSGGSDKK
YSIGLAIGTNSVGWAVITDEYKVPSKKFKVLGNTDRHSIKKNLIGALLFD
SGETAEATRLKRTARRRYTRRKNRICYLQEIFSNEMAKVDDSFFHRLEES
FLVEEDKKHERHPIFGNIVDEVAYHEKYPTIYHLRKKLVDSTDKADLRLI
YLALAHMIKFRGHFLIEGDLNPDNSDVDKLFIQLVQTYNQLFEENPINAS
GVDAKAILSARLSKSRRLENLIAQLPGEKKNGLFGNLIALSLGLTPNFKS
NFDLAEDAKLQLSKDTYDDDLDNLLAQIGDQYADLFLAAKNLSDAILLSD
ILRVNTEITKAPLSASMIKRYDEHHQDLTLLKALVRQQLPEKYKEIFFDQ
SKNGYAGYIDGGASQEEFYKFIKPILEKMDGTEELLVKLNREDLLRKQRT
FDNGSIPHQIHLGELHAILRRQEDFYPFLKDNREKIEKILTFRIPYYVGP
LARGNSRFAWMTRKSEETITPWNFEEVVDKGASAQSFIERMTNFDKNLPN
EKVLPKHSLLYEYFTVYNELTKVKYVTEGMRKPAFLSGEQKKAIVDLLFK
TNRKVTVKQLKEDYFKKIECFDSVEISGVEDRFNASLGTYHDLLKIIKDK
DFLDNEENEDILEDIVLTLTLFEDREMIEERLKTYAHLFDDKVMKQLKRR
RYTGWGRLSRKLINGIRDKQSGKTILDFLKSDGFANRNFMQLIHDDSLTF
KEDIQKAQVSGQGDSLHEHIANLAGSPAIKKGILQTVKVVDELVKVMGRH
KPENIVIEMARENQTTQKGQKNSRERMKRIEEGIKELGSQILKEHPVENT
QLQNEKLYLYYLQNGRDMYVDQELDINRLSDYDVDHIVPQSFLKDDSIDN
KVLTRSDKNRGKSDNVPSEEVVKKMKNYWRQLLNAKLITQRKFDNLTKAE
RGGLSELDKAGFIKRQLVETRQITKHVAQILDSRMNTKYDENDKLIREVK
VITLKSKLVSDFRKDFQFYKVREINNYHHAHDAYLNAVVGTALIKKYPKL
ESEFVYGDYKVYDVRKMIAKSEQEIGKATAKYFFYSNIMNFFKTEITLAN
GEIRKRPLIETNGETGEIVWDKGRDFATVRKVLSMPQVNIVKKTEVQTGG
FSKESILPKRNSDKLIARKKDWDPKKYGGFDSPTVAYSVLVVAKVEKGKS
KKLKSVKELLGITIMERSSFEKNPIDFLEAKGYKEVKKDLIIKLPKYSLF
ELENGRKRMLASAGELQKGNELALPSKYVNFLYLASHYEKLKGSPEDNEQ
KQLFVEQHKHYLDEIIEQISEFSKRVILADANLDKVLSAYNKHRDKPIRE
QAENIIHLFTLTNLGAPAAFKYFDTTIDRKRYTSTKEVLDATLIHQSITG
LYETRIDLSQLGGDSGGSPKKKRKVc
ABE7.9
ecTadA_{(wild-type)}-(SGGS)₂-XTEN-(SGGS)2-
ecTadA_{(W23L}_H36L_P48A_R51L_L84F_A106V_
_{D108N}_H123Y_A142N_S146C_D147Y_R152P_
_{E155V}_I156F_K157N)-(SGGS)₂-XTEN-
(SGGS)₂_nCas9_SGGS_NLS
(SEQ ID NO: 199)
MSEVEFSHEYWMRHALTLAKRAWDEREVPVGAVLVHNNRVIGEGWNRPIG
RHDPTAHAEIMALRQGGLVMQNYRLIDATLYVTLEPCVMCAGAMIHSRIG
RVVFGARDAKTGAAGSLMDVLHHPGMNHRVEITEGILADECAALLSDFFR
MRRQEIKAQKKAQSSTDSGGSSGGSSGSETPGTSESATPESSGGSSGGSS
EVEFSHEYWMRHALTLAKRALDEREVPVGAVLVLNNRGEGWNRAIGLHDP
TAHAEIMALRQGGLVMQNYRLIDATLYVTFEPCVMCAGAMIHSRIGRVVF
GVRNAKTGAAGSLMDVLHYPGMNHRVEITEGILADECNALLCYFFRMPRQ
VFNAQKKAQSSTDSGGSSGGSSGSETPGTSESATPESSGGSSGGSDKKYS
IGLAIGTNSVGWAVITDEYKVPSKKFKVLGNTDRHSIKKNLIGALLFDSG
ETAEATRLKRTARRRYTRRKNRICYLQEIFSNEMAKVDDSFFHRLEESFL
VEEDKKHERHPIFGNIVDEVAYHEKYPTIYHLRKKLVDSTDKADLRLIYL
ALAHMIKFRGHFLIEGDLNPDNSDVDKLFIQLVQTYNQLFEENPINASGV
DAKAILSARLSKSRRLENLIAQLPGEKKNGLFGNLIALSLGLTPNFKSNF
DLAEDAKLQLSKDTYDDDLDNLLAQIGDQYADLFLAAKNLSDAILLSDIL
RVNTEITKAPLSASMIKRYDEHHQDLTLLKALVRQQLPEKYKEIFFDQSK
NGYAGYIDGGASQEEFYKFIKPILEKMDGTEELLVKLNREDLLRKQRTFD
NGSIPHQIHLGELHAILRRQEDFYPFLKDNREKIEKILTFRIPYYVGPLA
RGNSRFAWMTRKSEETITPWNFEEVVDKGASAQSFIERMTNFDKNLPNEK
VLPKHSLLYEYFTVYNELTKVKYVTEGMRKPAFLSGEQKKAIVDLLFKTN
RKVTVKQLKEDYFKKIECFDSVEISGVEDRFNASLGTYHDLLKIIKDKDF
LDNEENEDILEDIVLTLTLFEDREMIEERLKTYAHLFDDKVMKQLKRRRY
TGWGRLSRKLINGIRDKQSGKTILDFLKSDGFANRNFMQLIHDDSLTFKE
DIQKAQVSGQGDSLHEHIANLAGSPAIKKGILQTVKVVDELVKVMGRHKP
ENIVIEMARENQTTQKGQKNSRERMKRIEEGIKELGSQILKEHPVENTQL
QNEKLYLYYLQNGRDMYVDQELDINRLSDYDVDHIVPQSFLKDDSIDNKV
LTRSDKNRGKSDNVPSEEVVKKMKNYWRQLLNAKLITQRKFDNLTKAERG
GLSELDKAGFIKRQLVETRQITKHVAQILDSRMNTKYDENDKLIREVKVI
TLKSKLVSDFRKDFQFYKVREINNYHHAHDAYLNAVVGTALIKKYPKLES
EFVYGDYKVYDVRKMIAKSEQEIGKATAKYFFYSNIMNFFKTEITLANGE
IRKRPLIETNGETGEIVWDKGRDFATVRKVLSMPQVNIVKKTEVQTGGFS
KESILPKRNSDKLIARKKDWDPKKYGGFDSPTVAYSVLVVAKVEKGKSKK
LKSVKELLGITIMERSSFEKNPIDFLEAKGYKEVKKDLIIKLPKYSLFEL
ENGRKRMLASAGELQKGNELALPSKYVNFLYLASHYEKLKGSPEDNEQKQ
LFVEQHKHYLDEIIEQISEFSKRVILADANLDKVLSAYNKHRDKPIREQA
ENIIHLFTLTNLGAPAAFKYFDTTIDRKRYTSTKEVLDATLIHQSITGLY
ETRIDLSQLGGDSGGSPKKKRKV
ABE7.10
ecTadA_{(wild-type)}-(SGGS)₂-XTEN-(SGGS)₂-
ecTadA_{(W23R}_H36L_P48A_R51L_L84F_A106V_
_{D108N}_H123Y_S146C_D147Y_R152P_E155V_
_{I156F}_K157N)-(SGGS)₂-XTEN-(SGGS)₂_
nCas9_SGGS_NLS
(SEQ ID NO: 200)
MSEVEFSHEYWMRHALTLAKRAWDEREVPVGAVLVHNNRVIGEGWNRPIG
RHDPTAHAEIMALRQGGLVMQNYRLIDATLYVTLEPCVMCAGAMIHSRIG
RVVFGARDAKTGAAGSLMDVLHHPGMNHRVEITEGILADECAALLSDFFR
MRRQEIKAQKKAQSSTDSGGSSGGSSGSETPGTSESATPESSGGSSGGSS
EVEFSHEYWMRHALTLAKRARDEREVPVGAVLVLNNRVIGEGWNRAIGLH
DPTAHAEIMALRQGGLVMQNYRLIDATLYVTFEPCVMCAGAMIHSRIGRV
VFGVRNAKTGAAGSLMDVLHYPGMNHRVEITEGILADECAALLCYFFRMP
RQVFNAQKKAQSSTDSGGSSGGSSGSETPGTSESATPESSGGSSGGSDKK
YSIGLAIGTNSVGWAVITDEYKVPSKKFKVLGNTDRHSIKKNLIGALLFD
SGETAEATRLKRTARRRYTRRKNRICYLQEIFSNEMAKVDDSFFHRLEES
FLVEEDKKHERHPIFGNIVDEVAYHEKYPTIYHLRKKLVDSTDKADLRLI
YLALAHMIKFRGHFLIEGDLNPDNSDVDKLFIQLVQTYNQLFEENPINAS
GVDAKAILSARLSKSRRLENLIAQLPGEKKNGLFGNLIALSLGLTPNFKS
NFDLAEDAKLQLSKDTYDDDLDNLLAQIGDQYADLFLAAKNLSDAILLSD
ILRVNTEITKAPLSASMIKRYDEHHQDLTLLKALVRQQLPEKYKEIFFDQ
SKNGYAGYIDGGASQEEFYKFIKPILEKMDGTEELLVKLNREDLLRKQRT
FDNGSIPHQIHLGELHAILRRQEDFYPFLKDNREKIEKILTFRIPYYVGP
LARGNSRFAWMTRKSEETITPWNFEEVVDKGASAQSFIERMTNFDKNLPN
EKVLPKHSLLYEYFTVYNELTKVKYVTEGMRKPAFLSGEQKKAIVDLLFK
TNRKVTVKQLKEDYFKKIECFDSVEISGVEDRFNASLGTYHDLLKIIKDK
DFLDNEENEDILEDIVLTLTLFEDREMIEERLKTYAHLFDDKVMKQLKRR
RYTGWGRLSRKLINGIRDKQSGKTILDFLKSDGFANRNFMQLIHDDSLTF
KEDIQKAQVSGQGDSLHEHIANLAGSPAIKKGILQTVKVVDELVKVMGRH
KPENIVIEMARENQTTQKGQKNSRERMKRIEEGIKELGSQILKEHPVENT
QLQNEKLYLYYLQNGRDMYVDQELDINRLSDYDVDHIVPQSFLKDDSIDN
KVLTRSDKNRGKSDNVPSEEVVKKMKNYWRQLLNAKLITQRKFDNLTKAE
RGGLSELDKAGFIKRQLVETRQITKHVAQILDSRMNTKYDENDKLIREVK
VITLKSKLVSDFRKDFQFYKVREINNYHHAHDAYLNAVVGTALIKKYPKL
ESEFVYGDYKVYDVRKMIAKSEQEIGKATAKYFFYSNIMNFFKTEITLAN
GEIRKRPLIETNGETGEIVWDKGRDFATVRKVLSMPQVNIVKKTEVQTGG
FSKESILPKRNSDKLIARKKDWDPKKYGGFDSPTVAYSVLVVAKVEKGKS
KKLKSVKELLGITIMERSSFEKNPIDFLEAKGYKEVKKDLIIKLPKYSLF
ELENGRKRMLASAGELQKGNELALPSKYVNFLYLASHYEKLKGSPEDNEQ
KQLFVEQHKHYLDEIIEQISEFSKRVILADANLDKVLSAYNKHRDKPIRE
QAENIIHLFTLTNLGAPAAFKYFDTTIDRKRYTSTKEVLDATLIHQSITG
LYETRIDLSQLGGDSGGSPKKKRKV
ABEmax (7.10)
NLS_ecTadA_{(wild-type)}-(SGGS)₂-XTEN-(SGGS)₂-
ecTadA7.10_{(W23R}_H36L_P48A_R51L_L84F_A106V_
_{D108N}_H123Y_S146C_D147Y_R152P_E155V_I156F_
_{K157N)}-(SGGS)₂-XTEN-(SGGS)₂_nCas9VRQR_SGGS_NLS
(SEQ ID NO: 201)
MKRTADGSEFESPKKKRKVSEVEFSHEYWMRHALTLAKRAWDEREVPVGA
VLVHNNRVIGEGWNRPIGRHDPTAHAEIMALRQGGLVMQNYRLIDATLYV
TLEPCVMCAGAMIHSRIGRVVFGARDAKTGAAGSLMDVLHHPGMNHRVEI
TEGILADECAALLSDFFRMRRQEIKAQKKAQSSTDSGGSSGGSSGSETPG
TSESATPESSGGSSGGSSEVEFSHEYWMRHALTLAKRARDEREVPVGAVL
VLNNRVIGEGWNRAIGLHDPTAHAEIMALRQGGLVMQNYRLIDATLYVTF
EPCVMCAGAMIHSRIGRVVFGVRNAKTGAAGSLMDVLHYPGMNHRVEITE
GILADECAALLCYFFRMPRQVFNAQKKAQSSTDSGGSSGGSSGSETPGTS
ESATPESSGGSSGGSDKKYSIGLAIGTNSVGWAVITDEYKVPSKKFKVLG
NTDRHSIKKNLIGALLFDSGETAEATRLKRTARRRYTRRKNRICYLQEIF
SNEMAKVDDSFFHRLEESFLVEEDKKHERHPIFGNIVDEVAYHEKYPTIY
HLRKKLVDSTDKADLRLIYLALAHMIKFRGHFLIEGDLNPDNSDVDKLFI
QLVQTYNQLFEENPINASGVDAKAILSARLSKSRRLENLIAQLPGEKKNG
LFGNLIALSLGLTPNFKSNFDLAEDAKLQLSKDTYDDDLDNLLAQIGDQY
ADLFLAAKNLSDAILLSDILRVNTEITKAPLSASMIKRYDEHHQDLTLLK
ALVRQQLPEKYKEIFFDQSKNGYAGYIDGGASQEEFYKFIKPILEKMDGT
EELLVKLNREDLLRKQRTFDNGSIPHQIHLGELHAILRRQEDFYPFLKDN
REKIEKILTFRIPYYVGPLARGNSRFAWMTRKSEETITPWNFEEVVDKGA
SAQSFIERMTNFDKNLPNEKVLPKHSLLYEYFTVYNELTKVKYVTEGMRK
PAFLSGEQKKAIVDLLFKTNRKVTVKQLKEDYFKKIECFDSVEISGVEDR
FNASLGTYHDLLKIIKDKDFLDNEENEDILEDIVLTLTLFEDREMIEERL
KTYAHLFDDKVMKQLKRRRYTGWGRLSRKLINGIRDKQSGKTILDFLKSD
GFANRNFMQLIHDDSLTFKEDIQKAQVSGQGDSLHEHIANLAGSPAIKKG
ILQTVKVVDELVKVMGRHKPENIVIEMARENQTTQKGQKNSRERMKRIEE
GIKELGSQILKEHPVENTQLQNEKLYLYYLQNGRDMYVDQELDINRLSDY
DVDHIVPQSFLKDDSIDNKVLTRSDKNRGKSDNVPSEEVVKKMKNYWRQL
LNAKLITQRKFDNLTKAERGGLSELDKAGFIKRQLVETRQITKHVAQILD
SRMNTKYDENDKLIREVKVITLKSKLVSDFRKDFQFYKVREINNYHHAHD
AYLNAVVGTALIKKYPKLESEFVYGDYKVYDVRKMIAKSEQEIGKATAKY
FFYSNIMNFFKTEITLANGEIRKRPLIETNGETGEIVWDKGRDFATVRKV
LSMPQVNIVKKTEVQTGGFSKESILPKRNSDKLIARKKDWDPKKYGGFVS
PTVAYSVLVVAKVEKGKSKKLKSVKELLGITIMERSSFEKNPIDFLEAKG
YKEVKKDLIIKLPKYSLFELENGRKRMLASARELQKGNELALPSKYVNFL
YLASHYEKLKGSPEDNEQKQLFVEQHKHYLDEIIEQISEFSKRVILADAN
LDKVLSAYNKHRDKPIREQAENIIHLFTLTNLGAPAAFKYFDTTIDRKQY
RSTKEVLDATLIHQSITGLYETRIDLSQLGGDSGGSKRTADGSEFEPKKK
RKV

[0389] Exemplary base editors comprise sequences that are at least least 85%, at least 90%, at least 95%, at least 98%, at least 99%, or at least 99.5% identical to any of the following amino acid sequences:

ABE8e
(SEQ ID NO: 202)
MKRTADGSEFESPKKKRKVSEVEFSHEYWMRHALTLAKRARDEREVPVGAVLVLN
NRVIGEGWNRAIGLHDPTAHAEIMALRQGGLVMQNYRLIDATLYVTFEPCVMCAGA
MIHSRIGRVVFGVRNSKRGAAGSLMNVLNYPGMNHRVEITEGILADECAALLCDFY
RMPRQVFNAQKKAQSSINSGGSSGGSSGSETPGTSESATPESSGGSSGGSDKKYSIGL
AIGTNSVGWAVITDEYKVPSKKFKVLGNTDRHSIKKNLIGALLFDSGETAEATRLKR
TARRRYTRRKNRICYLQEIFSNEMAKVDDSFFHRLEESFLVEEDKKHERHPIFGNIVD
EVAYHEKYPTIYHLRKKLVDSTDKADLRLIYLALAHMIKFRGHFLIEGDLNPDNSDV
DKLFIQLVQTYNQLFEENPINASGVDAKAILSARLSKSRRLENLIAQLPGEKKNGLFG
NLIALSLGLTPNFKSNFDLAEDAKLQLSKDTYDDDLDNLLAQIGDQYADLFLAAKNL
SDAILLSDILRVNTEITKAPLSASMIKRYDEHHQDLTLLKALVRQQLPEKYKEIFFDQS
KNGYAGYIDGGASQEEFYKFIKPILEKMDGTEELLVKLNREDLLRKQRTFDNGSIPH
QIHLGELHAILRRQEDFYPFLKDNREKIEKILTFRIPYYVGPLARGNSRFAWMTRKSE
ETITPWNFEEVVDKGASAQSFIERMTNFDKNLPNEKVLPKHSLLYEYFTVYNELTKV
KYVTEGMRKPAFLSGEQKKAIVDLLFKTNRKVTVKQLKEDYFKKIECFDSVEISGVE
DRFNASLGTYHDLLKIIKDKDFLDNEENEDILEDIVLTLTLFEDREMIEERLKTYAHLF
DDKVMKQLKRRRYTGWGRLSRKLINGIRDKQSGKTILDFLKSDGFANRNFMQLIHD
DSLTFKEDIQKAQVSGQGDSLHEHIANLAGSPAIKKGILQTVKVVDELVKVMGRHKP
ENIVIEMARENQTTQKGQKNSRERMKRIEEGIKELGSQILKEHPVENTQLQNEKLYLY
YLQNGRDMYVDQELDINRLSDYDVDHIVPQSFLKDDSIDNKVLTRSDKNRGKSDNV
PSEEVVKKMKNYWRQLLNAKLITQRKFDNLTKAERGGLSELDKAGFIKRQLVETRQ
ITKHVAQILDSRMNTKYDENDKLIREVKVITLKSKLVSDFRKDFQFYKVREINNYHH
AHDAYLNAVVGTALIKKYPKLESEFVYGDYKVYDVRKMIAKSEQEIGKATAKYFFY
SNIMNFFKTEITLANGEIRKRPLIETNGETGEIVWDKGRDFATVRKVLSMPQVNIVKK
TEVQTGGFSKESILPKRNSDKLIARKKDWDPKKYGGFDSPTVAYSVLVVAKVEKGK
SKKLKSVKELLGITIMERSSFEKNPIDFLEAKGYKEVKKDLIIKLPKYSLFELENGRKR
MLASAGELQKGNELALPSKYVNFLYLASHYEKLKGSPEDNEQKQLFVEQHKHYLDE
IIEQISEFSKRVILADANLDKVLSAYNKHRDKPIREQAENIIHLFTLTNLGAPAAFKYF
DTTIDRKRYTSTKEVLDATLIHQSITGLYETRIDLSQLGGDSGGSKRTADGSEFEPKK
KRKV
ABESe-dimer
(SEQ ID NO: 203)
MKRTADGSEFESPKKKRKVSEVEFSHEYWMRHALTLAKRAWDEREVPVGAVLVHN
NRVIGEGWNRPIGRHDPTAHAEIMALRQGGLVMQNYRLIDATLYVTLEPCVMCAGA
MIHSRIGRVVFGARDAKTGAAGSLMDVLHHPGMNHRVEITEGILADECAALLSDFFR
MRRQEIKAQKKAQSSTDSGGSSGGSSGSETPGTSESATPESSGGSSGGSSEVEFSHEY
WMRHALTLAKRARDEREVPVGAVLVLNNRVIGEGWNRAIGLHDPTAHAEIMALRQ
GGLVMQNYRLIDATLYVTFEPCVMCAGAMIHSRIGRVVFGVRNSKRGAAGSLMNV
LNYPGMNHRVEITEGILADECAALLCDFYRMPRQVFNAQKKAQSSINSGGSSGGSSG
SETPGTSESATPESSGGSSGGSDKKYSIGLAIGTNSVGWAVITDEYKVPSKKFKVLGN
TDRHSIKKNLIGALLFDSGETAEATRLKRTARRRYTRRKNRICYLQEIFSNEMAKVDD
SFFHRLEESFLVEEDKKHERHPIFGNIVDEVAYHEKYPTIYHLRKKLVDSTDKADLRL
IYLALAHMIKFRGHFLIEGDLNPDNSDVDKLFIQLVQTYNQLFEENPINASGVDAKAI
LSARLSKSRRLENLIAQLPGEKKNGLFGNLIALSLGLTPNFKSNFDLAEDAKLQLSKD
TYDDDLDNLLAQIGDQYADLFLAAKNLSDAILLSDILRVNTEITKAPLSASMIKRYDE
HHQDLTLLKALVRQQLPEKYKEIFFDQSKNGYAGYIDGGASQEEFYKFIKPILEKMD
GTEELLVKLNREDLLRKQRTFDNGSIPHQIHLGELHAILRRQEDFYPFLKDNREKIEKI
LTFRIPYYVGPLARGNSRFAWMTRKSEETITPWNFEEVVDKGASAQSFIERMTNFDK
NLPNEKVLPKHSLLYEYFTVYNELTKVKYVTEGMRKPAFLSGEQKKAIVDLLFKTN
RKVTVKQLKEDYFKKIECFDSVEISGVEDRFNASLGTYHDLLKIIKDKDFLDNEENED
ILEDIVLTLTLFEDREMIEERLKTYAHLFDDKVMKQLKRRRYTGWGRLSRKLINGIRD
KQSGKTILDFLKSDGFANRNFMQLIHDDSLTFKEDIQKAQVSGQGDSLHEHIANLAG
SPAIKKGILQTVKVVDELVKVMGRHKPENIVIEMARENQTTQKGQKNSRERMKRIEE
GIKELGSQILKEHPVENTQLQNEKLYLYYLQNGRDMYVDQELDINRLSDYDVDHIVP
QSFLKDDSIDNKVLTRSDKNRGKSDNVPSEEVVKKMKNYWRQLLNAKLITQRKFDN
LTKAERGGLSELDKAGFIKRQLVETRQITKHVAQILDSRMNTKYDENDKLIREVKVIT
LKSKLVSDFRKDFQFYKVREINNYHHAHDAYLNAVVGTALIKKYPKLESEFVYGDY
KVYDVRKMIAKSEQEIGKATAKYFFYSNIMNFFKTEITLANGEIRKRPLIETNGETGEI
VWDKGRDFATVRKVLSMPQVNIVKKTEVQTGGFSKESILPKRNSDKLIARKKDWDP
KKYGGFDSPTVAYSVLVVAKVEKGKSKKLKSVKELLGITIMERSSFEKNPIDFLEAK
GYKEVKKDLIIKLPKYSLFELENGRKRMLASAGELQKGNELALPSKYVNFLYLASHY
EKLKGSPEDNEQKQLFVEQHKHYLDEIIEQISEFSKRVILADANLDKVLSAYNKHRD
KPIREQAENIIHLFTLTNLGAPAAFKYFDTTIDRKRYTSTKEVLDATLIHQSITGLYETR
IDLSQLGGDSGGSKRTADGSEFEPKKKRKV
SaABE8e
(SEQ ID NO: 204)
MKRTADGSEFESPKKKRKVSEVEFSHEYWMRHALTLAKRARDEREVPVGAVLVLN
NRVIGEGWNRAIGLHDPTAHAEIMALRQGGLVMQNYRLIDATLYVTFEPCVMCAGA
MIHSRIGRVVFGVRNSKRGAAGSLMNVLNYPGMNHRVEITEGILADECAALLCDFY
RMPRQVFNAQKKAQSSINSGGSSGGSSGSETPGTSESATPESSGGSSGGSGKRNYILG
LAIGITSVGYGIIDYETRDVIDAGVRLFKEANVENNEGRRSKRGARRLKRRRRHRIQR
VKKLLFDYNLLTDHSELSGINPYEARVKGLSQKLSEEEFSAALLHLAKRRGVHNVNE
VEEDTGNELSTKEQISRNSKALEEKYVAELQLERLKKDGEVRGSINRFKTSDYVKEA
KQLLKVQKAYHQLDQSFIDTYIDLLETRRTYYEGPGEGSPFGWKDIKEWYEMLMGH
CTYFPEELRSVKYAYNADLYNALNDLNNLVITRDENEKLEYYEKFQIIENVFKQKKK
PTLKQIAKEILVNEEDIKGYRVTSTGKPEFTNLKVYHDIKDITARKEIIENAELLDQIAK
ILTIYQSSEDIQEELTNLNSELTQEEIEQISNLKGYTGTHNLSLKAINLILDELWHTNDN
QIAIFNRLKLVPKKVDLSQQKEIPTTLVDDFILSPVVKRSFIQSIKVINAIIKKYGLPNDII
IELAREKNSKDAQKMINEMQKRNRQTNERIEEIIRTTGKENAKYLIEKIKLHDMQEGK
CLYSLEAIPLEDLLNNPFNYEVDHIIPRSVSFDNSFNNKVLVKQEENSKKGNRTPFQY
LSSSDSKISYETFKKHILNLAKGKGRISKTKKEYLLEERDINRFSVQKDFINRNLVDTR
YATRGLMNLLRSYFRVNNLDVKVKSINGGFTSFLRRKWKFKKERNKGYKHHAEDA
LIIANADFIFKEWKKLDKAKKVMENQMFEEKQAESMPEIETEQEYKEIFITPHQIKHIK
DFKDYKYSHRVDKKPNRELINDTLYSTRKDDKGNTLIVNNLNGLYDKDNDKLKKLI
NKSPEKLLMYHHDPQTYQKLKLIMEQYGDEKNPLYKYYEETGNYLTKYSKKDNGP
VIKKIKYYGNKLNAHLDITDDYPNSRNKVVKLSLKPYRFDVYLDNGVYKFVTVKNL
DVIKKENYYEVNSKCYEEAKKLKKISNQAEFIASFYNNDLIKINGELYRVIGVNNDLL
NRIEVNMIDITYREYLENMNDKRPPRIIKTIASKTQSIKKYSTDILGNLYEVKSKKHPQI
IKKGSGGSKRTADGSEFEPKKKRKV
SaABE8e-dimer
(SEQ ID NO: 205)
MKRTADGSEFESPKKKRKVSEVEFSHEYWMRHALTLAKRAWDEREVPVGAVLVHN
NRVIGEGWNRPIGRHDPTAHAEIMALRQGGLVMQNYRLIDATLYVTLEPCVMCAGA
MIHSRIGRVVFGARDAKTGAAGSLMDVLHHPGMNHRVEITEGILADECAALLSDFFR
MRRQEIKAQKKAQSSTDSGGSSGGSSGSETPGTSESATPESSGGSSGGSSEVEFSHEY
WMRHALTLAKRARDEREVPVGAVLVLNNRVIGEGWNRAIGLHDPTAHAEIMALRQ
GGLVMQNYRLIDATLYVTFEPCVMCAGAMIHSRIGRVVFGVRNSKRGAAGSLMNV
LNYPGMNHRVEITEGILADECAALLCDFYRMPRQVFNAQKKAQSSINSGGSSGGSSG
SETPGTSESATPESSGGSSGGSGKRNYILGLAIGITSVGYGIIDYETRDVIDAGVRLFKE
ANVENNEGRRSKRGARRLKRRRRHRIQRVKKLLFDYNLLTDHSELSGINPYEARVK
GLSQKLSEEEFSAALLHLAKRRGVHNVNEVEEDTGNELSTKEQISRNSKALEEKYVA
ELQLERLKKDGEVRGSINRFKTSDYVKEAKQLLKVQKAYHQLDQSFIDTYIDLLETR
RTYYEGPGEGSPFGWKDIKEWYEMLMGHCTYFPEELRSVKYAYNADLYNALNDLN
NLVITRDENEKLEYYEKFQIIENVFKQKKKPTLKQIAKEILVNEEDIKGYRVTSTGKPE
FTNLKVYHDIKDITARKEIIENAELLDQIAKILTIYQSSEDIQEELTNLNSELTQEEIEQIS
NLKGYTGTHNLSLKAINLILDELWHTNDNQIAIFNRLKLVPKKVDLSQQKEIPTTLVD
DFILSPVVKRSFIQSIKVINAIIKKYGLPNDIIIELAREKNSKDAQKMINEMQKRNRQTN
ERIEEIIRTTGKENAKYLIEKIKLHDMQEGKCLYSLEAIPLEDLLNNPFNYEVDHIIPRS
VSFDNSFNNKVLVKQEENSKKGNRTPFQYLSSSDSKISYETFKKHILNLAKGKGRISK
TKKEYLLEERDINRFSVQKDFINRNLVDTRYATRGLMNLLRSYFRVNNLDVKVKSIN
GGFTSFLRRKWKFKKERNKGYKHHAEDALIIANADFIFKEWKKLDKAKKVMENQM
FEEKQAESMPEIETEQEYKEIFITPHQIKHIKDFKDYKYSHRVDKKPNRELINDTLYST
RKDDKGNTLIVNNLNGLYDKDNDKLKKLINKSPEKLLMYHHDPQTYQKLKLIMEQY
GDEKNPLYKYYEETGNYLTKYSKKDNGPVIKKIKYYGNKLNAHLDITDDYPNSRNK
VVKLSLKPYRFDVYLDNGVYKFVTVKNLDVIKKENYYEVNSKCYEEAKKLKKISNQ
AEFIASFYNNDLIKINGELYRVIGVNNDLLNRIEVNMIDITYREYLENMNDKRPPRIIK
TIASKTQSIKKYSTDILGNLYEVKSKKHPQIIKKGSGGSKRTADGSEFEPKKKRKV
LbABE8e
(SEQ ID NO: 206)
MKRTADGSEFESPKKKRKVSEVEFSHEYWMRHALTLAKRARDEREVPVGAVLVLN
NRVIGEGWNRAIGLHDPTAHAEIMALRQGGLVMQNYRLIDATLYVTFEPCVMCAGA
MIHSRIGRVVFGVRNSKRGAAGSLMNVLNYPGMNHRVEITEGILADECAALLCDFY
RMPRQVFNAQKKAQSSINSGGSSGGSSGSETPGTSESATPESSGGSSGGSSKLEKFTN
CYSLSKTLRFKAIPVGKTQENIDNKRLLVEDEKRAEDYKGVKKLLDRYYLSFINDVL
HSIKLKNLNNYISLFRKKTRTEKENKELENLEINLRKEIAKAFKGNEGYKSLFKKDIIE
TILPEFLDDKDEIALVNSFNGFTTAFTGFFDNRENMFSEEAKSTSIAFRCINENLTRYIS
NMDIFEKVDAIFDKHEVQEIKEKILNSDYDVEDFFEGEFFNFVLTQEGIDVYNAIIGGF
VTESGEKIKGLNEYINLYNQKTKQKLPKFKPLYKQVLSDRESLSFYGEGYTSDEEVLE
VFRNTLNKNSEIFSSIKKLEKLFKNFDEYSSAGIFVKNGPAISTISKDIFGEWNVIRDK
WNAEYDDIHLKKKAVVTEKYEDDRRKSFKKIGSFSLEQLQEYADADLSVVEKLKEIII
QKVDEIYKVYGSSEKLFDADFVLEKSLKKNDAVVAIMKDLLDSVKSFENYIKAFFGE
GKETNRDESFYGDFVLAYDILLKVDHIYDAIRNYVTQKPYSKDKFKLYFQNPQFMG
GWDKDKETDYRATILRYGSKYYLAIMDKKYAKCLQKIDKDDVNGNYEKINYKLLP
GPNKMLPKVFFSKKWMAYYNPSEDIQKIYKNGTFKKGDMFNLNDCHKLIDFFKDSIS
RYPKWSNAYDFNFSETEKYKDIAGFYREVEEQGYKVSFESASKKEVDKLVEEGKLY
MFQIYNKDFSDKSHGTPNLHTMYFKLLFDENNHGQIRLSGGAELFMRRASLKKEEL
VVHPANSPIANKNPDNPKKTTTLSYDVYKDKRFSEDQYELHIPIAINKCPKNIFKINTE
VRVLLKHDDNPYVIGIARGERNLLYIVVVDGKGNIVEQYSLNEIINNFNGIRIKTDYHS
LLDKKEKERFEARQNWTSIENIKELKAGYISQVVHKICELVEKYDAVIALEDLNSGFK
NSRVKVEKQVYQKFEKMLIDKLNYMVDKKSNPCATGGALKGYQITNKFESFKSMST
QNGFIFYIPAWLTSKIDPSTGFVNLLKTKYTSIADSKKFISSFDRIMYVPEEDLFEFALD
YKNFSRTDADYIKKWKLYSYGNRIRIFRNPKKNNVFDWEEVCLTSAYKELFNKYGIN
YQQGDIRALLCEQSDKAFYSSFMALMSLMLQMRNSITGRTDVDFLISPVKNSDGIFY
DSRNYEAQENAILPKNADANGAYNIARKVLWAIGQFKKAEDEKLDKVKIAISNKEW
LEYAQTSVKSGGSKRTADGSEFEPKKKRKV
LbABE8e-dimer
(SEQ ID NO: 207)
MKRTADGSEFESPKKKRKVSEVEFSHEYWMRHALTLAKRAWDEREVPVGAVLVHN
NRVIGEGWNRPIGRHDPTAHAEIMALRQGGLVMQNYRLIDATLYVTLEPCVMCAGA
MIHSRIGRVVFGARDAKTGAAGSLMDVLHHPGMNHRVEITEGILADECAALLSDFFR
MRRQEIKAQKKAQSSTDSGGSSGGSSGSETPGTSESATPESSGGSSGGSSEVEFSHEY
WMRHALTLAKRARDEREVPVGAVLVLNNRVIGEGWNRAIGLHDPTAHAEIMALRQ
GGLVMQNYRLIDATLYVTFEPCVMCAGAMIHSRIGRVVFGVRNSKRGAAGSLMNV
LNYPGMNHRVEITEGILADECAALLCDFYRMPRQVFNAQKKAQSSINSGGSSGGSSG
SETPGTSESATPESSGGSSGGSSKLEKFTNCYSLSKTLRFKAIPVGKTQENIDNKRLLV
EDEKRAEDYKGVKKLLDRYYLSFINDVLHSIKLKNLNNYISLFRKKTRTEKENKELE
NLEINLRKEIAKAFKGNEGYKSLFKKDIIETILPEFLDDKDEIALVNSFNGFTTAFTGFF
DNRENMFSEEAKSTSIAFRCINENLTRYISNMDIFEKVDAIFDKHEVQEIKEKILNSDY
DVEDFFEGEFFNFVLTQEGIDVYNAIIGGFVTESGEKIKGLNEYINLYNQKTKQKLPK
FKPLYKQVLSDRESLSFYGEGYTSDEEVLEVFRNTLNKNSEIFSSIKKLEKLFKNFDEY
SSAGIFVKNGPAISTISKDIFGEWNVIRDKWNAEYDDIHLKKKAVVTEKYEDDRRKSF
KKIGSFSLEQLQEYADADLSVVEKLKEIIIQKVDEIYKVYGSSEKLFDADFVLEKSLK
KNDAVVAIMKDLLDSVKSFENYIKAFFGEGKETNRDESFYGDFVLAYDILLKVDHIY
DAIRNYVTQKPYSKDKFKLYFQNPQFMGGWDKDKETDYRATILRYGSKYYLAIMD
KKYAKCLQKIDKDDVNGNYEKINYKLLPGPNKMLPKVFFSKKWMAYYNPSEDIQKI
YKNGTFKKGDMFNLNDCHKLIDFFKDSISRYPKWSNAYDFNFSETEKYKDIAGFYRE
VEEQGYKVSFESASKKEVDKLVEEGKLYMFQIYNKDFSDKSHGTPNLHTMYFKLLF
DENNHGQIRLSGGAELFMRRASLKKEELVVHPANSPIANKNPDNPKKTTTLSYDVYK
DKRFSEDQYELHIPIAINKCPKNIFKINTEVRVLLKHDDNPYVIGIARGERNLLYIVVV
DGKGNIVEQYSLNEIINNFNGIRIKTDYHSLLDKKEKERFEARQNWTSIENIKELKAG
YISQVVHKICELVEKYDAVIALEDLNSGFKNSRVKVEKQVYQKFEKMLIDKLNYMV
DKKSNPCATGGALKGYQITNKFESFKSMSTQNGFIFYIPAWLTSKIDPSTGFVNLLKT
KYTSIADSKKFISSFDRIMYVPEEDLFEFALDYKNFSRTDADYIKKWKLYSYGNRIRIF
RNPKKNNVFDWEEVCLTSAYKELFNKYGINYQQGDIRALLCEQSDKAFYSSFMALM
SLMLQMRNSITGRTDVDFLISPVKNSDGIFYDSRNYEAQENAILPKNADANGAYNIA
RKVLWAIGQFKKAEDEKLDKVKIAISNKEWLEYAQTSVKSGGSKRTADGSEFEPKK
KRKV
LbABE7.10
(SEQ ID NO: 208)
MKRTADGSEFESPKKKRKVSEVEFSHEYWMRHALTLAKRAWDEREVPVGAVLVHN
NRVIGEGWNRPIGRHDPTAHAEIMALRQGGLVMQNYRLIDATLYVTLEPCVMCAGA
MIHSRIGRVVFGARDAKTGAAGSLMDVLHHPGMNHRVEITEGILADECAALLSDFFR
MRRQEIKAQKKAQSSTDSGGSSGGSSGSETPGTSESATPESSGGSSGGSSEVEFSHEY
WMRHALTLAKRARDEREVPVGAVLVLNNRVIGEGWNRAIGLHDPTAHAEIMALRQ
GGLVMQNYRLIDATLYVTFEPCVMCAGAMIHSRIGRVVFGVRNAKTGAAGSLMDV
LHYPGMNHRVEITEGILADECAALLCYFFRMPRQVFNAQKKAQSSTDSGGSSGGSSG
SETPGTSESATPESSGGSSGGSSKLEKFTNCYSLSKTLRFKAIPVGKTQENIDNKRLLV
EDEKRAEDYKGVKKLLDRYYLSFINDVLHSIKLKNLNNYISLFRKKTRTEKENKELE
NLEINLRKEIAKAFKGNEGYKSLFKKDIIETILPEFLDDKDEIALVNSFNGFTTAFTGFF
DNRENMFSEEAKSTSIAFRCINENLTRYISNMDIFEKVDAIFDKHEVQEIKEKILNSDY
DVEDFFEGEFFNFVLTQEGIDVYNAIIGGFVTESGEKIKGLNEYINLYNQKTKQKLPK
FKPLYKQVLSDRESLSFYGEGYTSDEEVLEVFRNTLNKNSEIFSSIKKLEKLFKNFDEY
SSAGIFVKNGPAISTISKDIFGEWNVIRDKWNAEYDDIHLKKKAVVTEKYEDDRRKSF
KKIGSFSLEQLQEYADADLSVVEKLKEIIIQKVDEIYKVYGSSEKLFDADFVLEKSLK
KNDAVVAIMKDLLDSVKSFENYIKAFFGEGKETNRDESFYGDFVLAYDILLKVDHIY
DAIRNYVTQKPYSKDKFKLYFQNPQFMGGWDKDKETDYRATILRYGSKYYLAIMD
KKYAKCLQKIDKDDVNGNYEKINYKLLPGPNKMLPKVFFSKKWMAYYNPSEDIQKI
YKNGTFKKGDMFNLNDCHKLIDFFKDSISRYPKWSNAYDFNFSETEKYKDIAGFYRE
VEEQGYKVSFESASKKEVDKLVEEGKLYMFQIYNKDFSDKSHGTPNLHTMYFKLLF
DENNHGQIRLSGGAELFMRRASLKKEELVVHPANSPIANKNPDNPKKTTTLSYDVYK
DKRFSEDQYELHIPIAINKCPKNIFKINTEVRVLLKHDDNPYVIGIARGERNLLYIVVV
DGKGNIVEQYSLNEIINNFNGIRIKTDYHSLLDKKEKERFEARQNWTSIENIKELKAG
YISQVVHKICELVEKYDAVIALEDLNSGFKNSRVKVEKQVYQKFEKMLIDKLNYMV
DKKSNPCATGGALKGYQITNKFESFKSMSTQNGFIFYIPAWLTSKIDPSTGFVNLLKT
KYTSIADSKKFISSFDRIMYVPEEDLFEFALDYKNFSRTDADYIKKWKLYSYGNRIRIF
RNPKKNNVFDWEEVCLTSAYKELFNKYGINYQQGDIRALLCEQSDKAFYSSFMALM
SLMLQMRNSITGRTDVDFLISPVKNSDGIFYDSRNYEAQENAILPKNADANGAYNIA
RKVLWAIGQFKKAEDEKLDKVKIAISNKEWLEYAQTSVKSGGSKRTADGSEFEPKK
KRKV
enAsABESe
(SEQ ID NO: 209)
MKRTADGSEFESPKKKRKVSEVEFSHEYWMRHALTLAKRARDEREVPVGAVLVLN
NRVIGEGWNRAIGLHDPTAHAEIMALRQGGLVMQNYRLIDATLYVTFEPCVMCAGA
MIHSRIGRVVFGVRNSKRGAAGSLMNVLNYPGMNHRVEITEGILADECAALLCDFY
RMPRQVFNAQKKAQSSINSGGSSGGSSGSETPGTSESATPESSGGSSGGSMTQFEGFT
NLYQVSKTLRFELIPQGKTLKHIQEQGFIEEDKARNDHYKELKPIIDRIYKTYADQCL
QLVQLDWENLSAAIDSYRKEKTEETRNALIEEQATYRNAIHDYFIGRTDNLTDAINKR
HAEIYKGLFKAELFNGKVLKQLGTVTTTEHENALLRSFDKFTTYFSGFYRNRKNVFS
AEDISTAIPHRIVQDNFPKFKENCHIFTRLITAVPSLREHFENVKKAIGIFVSTSIEEVFS
FPFYNQLLTQTQIDLYNQLLGGISREAGTEKIKGLNEVLNLAIQKNDETAHIIASLPHR
FIPLFKQILSDRNTLSFILEEFKSDEEVIQSFCKYKTLLRNENVLETAEALFNELNSIDLT
HIFISHKKLETISSALCDHWDTLRNALYERRISELTGKITKSAKEKVQRSLKHEDINLQ
EIISAAGKELSEAFKQKTSEILSHAHAALDQPLPTTLKKQEEKEILKSQLDSLLGLYHL
LDWFAVDESNEVDPEFSARLTGIKLEMEPSLSFYNKARNYATKKPYSVEKFKLNFQ
MPTLARGWDVNREKNNGAILFVKNGLYYLGIMPKQKGRYKALSFEPTEKTSEGFDK
MYYDYFPDAAKMIPKCSTQLKAVTAHFQTHTTPILLSNNFIEPLEITKEIYDLNNPEKE
PKKFQTAYAKKTGDQKGYREALCKWIDFTRDFLSKYTKTTSIDLSSLRPSSQYKDLG
EYYAELNPLLYHISFQRIAEKEIMDAVETGKLYLFQIYNKDFAKGHHGKPNLHTLYW
TGLFSPENLAKTSIKLNGQAELFYRPKSRMKRMAHRLGEKMLNKKLKDQKTPIPDTL
YQELYDYVNHRLSHDLSDEARALLPNVITKEVSHEIIKDRRFTSDKFFFHVPITLNYQ
AANSPSKFNQRVNAYLKEHPETPIIGIARGERNLIYITVIDSTGKILEQRSLNTIQQFDY
QKKLDNREKERVAARQAWSVVGTIKDLKQGYLSQVIHEIVDLMIHYQAVVVLENLN
FGFKSKRTGIAEKAVYQQFEKMLIDKLNCLVLKDYPAEKVGGVLNPYQLTDQFTSF
AKMGTQSGFLFYVPAPYTSKIDPLTGFVDPFVWKTIKNHESRKHFLEGFDFLHYDVK
TGDFILHFKMNRNLSFQRGLPGFMPAWDIVFEKNETQFDAKGTPFIAGKRIVPVIENH
RFTGRYRDLYPANELIALLEEKGIVFRDGSNILPKLLENDDSHAIDTMVALIRSVLQM
RNSNAATGEDYINSPVRDLNGVCFDSRFQNPEWPMDADANGAYHIALKGQLLLNHL
KESKDLKLQNGISNQDWLAYIQELRNSGGSKRTADGSEFEPKKKRKV
enAsABESe-dimer
(SEQ ID NO: 210)
MKRTADGSEFESPKKKRKVSEVEFSHEYWMRHALTLAKRAWDEREVPVGAVLVHN
NRVIGEGWNRPIGRHDPTAHAEIMALRQGGLVMQNYRLIDATLYVTLEPCVMCAGA
MIHSRIGRVVFGARDAKTGAAGSLMDVLHHPGMNHRVEITEGILADECAALLSDFFR
MRRQEIKAQKKAQSSTDSGGSSGGSSGSETPGTSESATPESSGGSSGGSSEVEFSHEY
WMRHALTLAKRARDEREVPVGAVLVLNNRVIGEGWNRAIGLHDPTAHAEIMALRQ
GGLVMQNYRLIDATLYVTFEPCVMCAGAMIHSRIGRVVFGVRNSKRGAAGSLMNV
LNYPGMNHRVEITEGILADECAALLCDFYRMPRQVFNAQKKAQSSINSGGSSGGSSG
SETPGTSESATPESSGGSSGGSMTQFEGFTNLYQVSKTLRFELIPQGKTLKHIQEQGFI
EEDKARNDHYKELKPIIDRIYKTYADQCLQLVQLDWENLSAAIDSYRKEKTEETRNA
LIEEQATYRNAIHDYFIGRTDNLTDAINKRHAEIYKGLFKAELFNGKVLKQLGTVTTT
EHENALLRSFDKFTTYFSGFYRNRKNVFSAEDISTAIPHRIVQDNFPKFKENCHIFTRLI
TAVPSLREHFENVKKAIGIFVSTSIEEVFSFPFYNQLLTQTQIDLYNQLLGGISREAGTE
KIKGLNEVLNLAIQKNDETAHIIASLPHRFIPLFKQILSDRNTLSFILEEFKSDEEVIQSF
CKYKTLLRNENVLETAEALFNELNSIDLTHIFISHKKLETISSALCDHWDTLRNALYE
RRISELTGKITKSAKEKVQRSLKHEDINLQEIISAAGKELSEAFKQKTSEILSHAHAAL
DQPLPTTLKKQEEKEILKSQLDSLLGLYHLLDWFAVDESNEVDPEFSARLTGIKLEME
PSLSFYNKARNYATKKPYSVEKFKLNFQMPTLARGWDVNREKNNGAILFVKNGLY
YLGIMPKQKGRYKALSFEPTEKTSEGFDKMYYDYFPDAAKMIPKCSTQLKAVTAHF
QTHTTPILLSNNFIEPLEITKEIYDLNNPEKEPKKFQTAYAKKTGDQKGYREALCKWI
DFTRDFLSKYTKTTSIDLSSLRPSSQYKDLGEYYAELNPLLYHISFQRIAEKEIMDAVE
TGKLYLFQIYNKDFAKGHHGKPNLHTLYWTGLFSPENLAKTSIKLNGQAELFYRPKS
RMKRMAHRLGEKMLNKKLKDQKTPIPDTLYQELYDYVNHRLSHDLSDEARALLPN
VITKEVSHEIIKDRRFTSDKFFFHVPITLNYQAANSPSKFNQRVNAYLKEHPETPIIGIA
RGERNLIYITVIDSTGKILEQRSLNTIQQFDYQKKLDNREKERVAARQAWSVVGTIKD
LKQGYLSQVIHEIVDLMIHYQAVVVLENLNFGFKSKRTGIAEKAVYQQFEKMLIDKL
NCLVLKDYPAEKVGGVLNPYQLTDQFTSFAKMGTQSGFLFYVPAPYTSKIDPLTGFV
DPFVWKTIKNHESRKHFLEGFDFLHYDVKTGDFILHFKMNRNLSFQRGLPGFMPAW
DIVFEKNETQFDAKGTPFIAGKRIVPVIENHRFTGRYRDLYPANELIALLEEKGIVFRD
GSNILPKLLENDDSHAIDTMVALIRSVLQMRNSNAATGEDYINSPVRDLNGVCFDSR
FQNPEWPMDADANGAYHIALKGQLLLNHLKESKDLKLQNGISNQDWLAYIQELRNS
GGSKRTADGSEFEPKKKRKV
enAsABE7.10
(SEQ ID NO: 211)
MKRTADGSEFESPKKKRKVSEVEFSHEYWMRHALTLAKRAWDEREVPVGAVLVHN
NRVIGEGWNRPIGRHDPTAHAEIMALRQGGLVMQNYRLIDATLYVTLEPCVMCAGA
MIHSRIGRVVFGARDAKTGAAGSLMDVLHHPGMNHRVEITEGILADECAALLSDFFR
MRRQEIKAQKKAQSSTDSGGSSGGSSGSETPGTSESATPESSGGSSGGSSEVEFSHEY
WMRHALTLAKRARDEREVPVGAVLVLNNRVIGEGWNRAIGLHDPTAHAEIMALRQ
GGLVMQNYRLIDATLYVTFEPCVMCAGAMIHSRIGRVVFGVRNAKTGAAGSLMDV
LHYPGMNHRVEITEGILADECAALLCYFFRMPRQVFNAQKKAQSSTDSGGSSGGSSG
SETPGTSESATPESSGGSSGGSMTQFEGFTNLYQVSKTLRFELIPQGKTLKHIQEQGFI
EEDKARNDHYKELKPIIDRIYKTYADQCLQLVQLDWENLSAAIDSYRKEKTEETRNA
LIEEQATYRNAIHDYFIGRTDNLTDAINKRHAEIYKGLFKAELFNGKVLKQLGTVTTT
EHENALLRSFDKFTTYFSGFYRNRKNVFSAEDISTAIPHRIVQDNFPKFKENCHIFTRLI
TAVPSLREHFENVKKAIGIFVSTSIEEVFSFPFYNQLLTQTQIDLYNQLLGGISREAGTE
KIKGLNEVLNLAIQKNDETAHIIASLPHRFIPLFKQILSDRNTLSFILEEFKSDEEVIQSF
CKYKTLLRNENVLETAEALFNELNSIDLTHIFISHKKLETISSALCDHWDTLRNALYE
RRISELTGKITKSAKEKVQRSLKHEDINLQEIISAAGKELSEAFKQKTSEILSHAHAAL
DQPLPTTLKKQEEKEILKSQLDSLLGLYHLLDWFAVDESNEVDPEFSARLTGIKLEME
PSLSFYNKARNYATKKPYSVEKFKLNFQMPTLARGWDVNREKNNGAILFVKNGLY
YLGIMPKQKGRYKALSFEPTEKTSEGFDKMYYDYFPDAAKMIPKCSTQLKAVTAHF
QTHTTPILLSNNFIEPLEITKEIYDLNNPEKEPKKFQTAYAKKTGDQKGYREALCKWI
DFTRDFLSKYTKTTSIDLSSLRPSSQYKDLGEYYAELNPLLYHISFQRIAEKEIMDAVE
TGKLYLFQIYNKDFAKGHHGKPNLHTLYWTGLFSPENLAKTSIKLNGQAELFYRPKS
RMKRMAHRLGEKMLNKKLKDQKTPIPDTLYQELYDYVNHRLSHDLSDEARALLPN
VITKEVSHEIIKDRRFTSDKFFFHVPITLNYQAANSPSKFNQRVNAYLKEHPETPIIGIA
RGERNLIYITVIDSTGKILEQRSLNTIQQFDYQKKLDNREKERVAARQAWSVVGTIKD
LKQGYLSQVIHEIVDLMIHYQAVVVLENLNFGFKSKRTGIAEKAVYQQFEKMLIDKL
NCLVLKDYPAEKVGGVLNPYQLTDQFTSFAKMGTQSGFLFYVPAPYTSKIDPLTGFV
DPFVWKTIKNHESRKHFLEGFDFLHYDVKTGDFILHFKMNRNLSFQRGLPGFMPAW
DIVFEKNETQFDAKGTPFIAGKRIVPVIENHRFTGRYRDLYPANELIALLEEKGIVFRD
GSNILPKLLENDDSHAIDTMVALIRSVLQMRNSNAATGEDYINSPVRDLNGVCFDSR
FQNPEWPMDADANGAYHIALKGQLLLNHLKESKDLKLQNGISNQDWLAYIQELRNS
GGSKRTADGSEFEPKKKRKV
SpCas9NG-ABE8e (“NG-ABESe”)
(SEQ ID NO: 212)
MKRTADGSEFESPKKKRKVSEVEFSHEYWMRHALTLAKRARDEREVPVGAVLVLN
NRVIGEGWNRAIGLHDPTAHAEIMALRQGGLVMQNYRLIDATLYVTFEPCVMCAGA
MIHSRIGRVVFGVRNSKRGAAGSLMNVLNYPGMNHRVEITEGILADECAALLCDFY
RMPRQVFNAQKKAQSSINSGGSSGGSSGSETPGTSESATPESSGGSSGGSDKKYSIGL
AIGTNSVGWAVITDEYKVPSKKFKVLGNTDRHSIKKNLIGALLFDSGETAEATRLKR
TARRRYTRRKNRICYLQEIFSNEMAKVDDSFFHRLEESFLVEEDKKHERHPIFGNIVD
EVAYHEKYPTIYHLRKKLVDSTDKADLRLIYLALAHMIKFRGHFLIEGDLNPDNSDV
DKLFIQLVQTYNQLFEENPINASGVDAKAILSARLSKSRRLENLIAQLPGEKKNGLFG
NLIALSLGLTPNFKSNFDLAEDAKLQLSKDTYDDDLDNLLAQIGDQYADLFLAAKNL
SDAILLSDILRVNTEITKAPLSASMIKRYDEHHQDLTLLKALVRQQLPEKYKEIFFDQS
KNGYAGYIDGGASQEEFYKFIKPILEKMDGTEELLVKLNREDLLRKQRTFDNGSIPH
QIHLGELHAILRRQEDFYPFLKDNREKIEKILTFRIPYYVGPLARGNSRFAWMTRKSE
ETITPWNFEEVVDKGASAQSFIERMTNFDKNLPNEKVLPKHSLLYEYFTVYNELTKV
KYVTEGMRKPAFLSGEQKKAIVDLLFKTNRKVTVKQLKEDYFKKIECFDSVEISGVE
DRFNASLGTYHDLLKIIKDKDFLDNEENEDILEDIVLTLTLFEDREMIEERLKTYAHLF
DDKVMKQLKRRRYTGWGRLSRKLINGIRDKQSGKTILDFLKSDGFANRNFMQLIHD
DSLTFKEDIQKAQVSGQGDSLHEHIANLAGSPAIKKGILQTVKVVDELVKVMGRHKP
ENIVIEMARENQTTQKGQKNSRERMKRIEEGIKELGSQILKEHPVENTQLQNEKLYLY
YLQNGRDMYVDQELDINRLSDYDVDHIVPQSFLKDDSIDNKVLTRSDKNRGKSDNV
PSEEVVKKMKNYWRQLLNAKLITQRKFDNLTKAERGGLSELDKAGFIKRQLVETRQ
ITKHVAQILDSRMNTKYDENDKLIREVKVITLKSKLVSDFRKDFQFYKVREINNYHH
AHDAYLNAVVGTALIKKYPKLESEFVYGDYKVYDVRKMIAKSEQEIGKATAKYFFY
SNIMNFFKTEITLANGEIRKRPLIETNGETGEIVWDKGRDFATVRKVLSMPQVNIVKK
TEVQTGGFSKESIRPKRNSDKLIARKKDWDPKKYGGFVSPTVAYSVLVVAKVEKGK
SKKLKSVKELLGITIMERSSFEKNPIDFLEAKGYKEVKKDLIIKLPKYSLFELENGRKR
MLASARFLQKGNELALPSKYVNFLYLASHYEKLKGSPEDNEQKQLFVEQHKHYLDE
IIEQISEFSKRVILADANLDKVLSAYNKHRDKPIREQAENIIHLFTLTNLGAPRAFKYFD
TTIDRKVYRSTKEVLDATLIHQSITGLYETRIDLSQLGGDSGGSKRTADGSEFEPKKK
RKV
NG-ABESe-dimer
(SEQ ID NO: 213)
MKRTADGSEFESPKKKRKVSEVEFSHEYWMRHALTLAKRAWDEREVPVGAVLVHN
NRVIGEGWNRPIGRHDPTAHAEIMALRQGGLVMQNYRLIDATLYVTLEPCVMCAGA
MIHSRIGRVVFGARDAKTGAAGSLMDVLHHPGMNHRVEITEGILADECAALLSDFFR
MRRQEIKAQKKAQSSTDSGGSSGGSSGSETPGTSESATPESSGGSSGGSSEVEFSHEY
WMRHALTLAKRARDEREVPVGAVLVLNNRVIGEGWNRAIGLHDPTAHAEIMALRQ
GGLVMQNYRLIDATLYVTFEPCVMCAGAMIHSRIGRVVFGVRNSKRGAAGSLMNV
LNYPGMNHRVEITEGILADECAALLCDFYRMPRQVFNAQKKAQSSINSGGSSGGSSG
SETPGTSESATPESSGGSSGGSDKKYSIGLAIGTNSVGWAVITDEYKVPSKKFKVLGN
TDRHSIKKNLIGALLFDSGETAEATRLKRTARRRYTRRKNRICYLQEIFSNEMAKVDD
SFFHRLEESFLVEEDKKHERHPIFGNIVDEVAYHEKYPTIYHLRKKLVDSTDKADLRL
IYLALAHMIKFRGHFLIEGDLNPDNSDVDKLFIQLVQTYNQLFEENPINASGVDAKAI
LSARLSKSRRLENLIAQLPGEKKNGLFGNLIALSLGLTPNFKSNFDLAEDAKLQLSKD
TYDDDLDNLLAQIGDQYADLFLAAKNLSDAILLSDILRVNTEITKAPLSASMIKRYDE
HHQDLTLLKALVRQQLPEKYKEIFFDQSKNGYAGYIDGGASQEEFYKFIKPILEKMD
GTEELLVKLNREDLLRKQRTFDNGSIPHQIHLGELHAILRRQEDFYPFLKDNREKIEKI
LTFRIPYYVGPLARGNSRFAWMTRKSEETITPWNFEEVVDKGASAQSFIERMTNFDK
NLPNEKVLPKHSLLYEYFTVYNELTKVKYVTEGMRKPAFLSGEQKKAIVDLLFKTN
RKVTVKQLKEDYFKKIECFDSVEISGVEDRFNASLGTYHDLLKIIKDKDFLDNEENED
ILEDIVLTLTLFEDREMIEERLKTYAHLFDDKVMKQLKRRRYTGWGRLSRKLINGIRD
KQSGKTILDFLKSDGFANRNFMQLIHDDSLTFKEDIQKAQVSGQGDSLHEHIANLAG
SPAIKKGILQTVKVVDELVKVMGRHKPENIVIEMARENQTTQKGQKNSRERMKRIEE
GIKELGSQILKEHPVENTQLQNEKLYLYYLQNGRDMYVDQELDINRLSDYDVDHIVP
QSFLKDDSIDNKVLTRSDKNRGKSDNVPSEEVVKKMKNYWRQLLNAKLITQRKFDN
LTKAERGGLSELDKAGFIKRQLVETRQITKHVAQILDSRMNTKYDENDKLIREVKVIT
LKSKLVSDFRKDFQFYKVREINNYHHAHDAYLNAVVGTALIKKYPKLESEFVYGDY
KVYDVRKMIAKSEQEIGKATAKYFFYSNIMNFFKTEITLANGEIRKRPLIETNGETGEI
VWDKGRDFATVRKVLSMPQVNIVKKTEVQTGGFSKESIRPKRNSDKLIARKKDWDP
KKYGGFVSPTVAYSVLVVAKVEKGKSKKLKSVKELLGITIMERSSFEKNPIDFLEAK
GYKEVKKDLIIKLPKYSLFELENGRKRMLASARFLQKGNELALPSKYVNFLYLASHY
EKLKGSPEDNEQKQLFVEQHKHYLDEIIEQISEFSKRVILADANLDKVLSAYNKHRD
KPIREQAENIIHLFTLTNLGAPRAFKYFDTTIDRKVYRSTKEVLDATLIHQSITGLYETR
IDLSQLGGDSGGSKRTADGSEFEPKKKRKV
SaKKH-ABESe (“KKH-ABE8e”)
(SEQ ID NO: 214)
MKRTADGSEFESPKKKRKVSEVEFSHEYWMRHALTLAKRARDEREVPVGAVLVLN
NRVIGEGWNRAIGLHDPTAHAEIMALRQGGLVMQNYRLIDATLYVTFEPCVMCAGA
MIHSRIGRVVFGVRNSKRGAAGSLMNVLNYPGMNHRVEITEGILADECAALLCDFY
RMPRQVFNAQKKAQSSINSGGSSGGSSGSETPGTSESATPESSGGSSGGSGKRNYILG
LAIGITSVGYGIIDYETRDVIDAGVRLFKEANVENNEGRRSKRGARRLKRRRRHRIQR
VKKLLFDYNLLTDHSELSGINPYEARVKGLSQKLSEEEFSAALLHLAKRRGVHNVNE
VEEDTGNELSTKEQISRNSKALEEKYVAELQLERLKKDGEVRGSINRFKTSDYVKEA
KQLLKVQKAYHQLDQSFIDTYIDLLETRRTYYEGPGEGSPFGWKDIKEWYEMLMGH
CTYFPEELRSVKYAYNADLYNALNDLNNLVITRDENEKLEYYEKFQIIENVFKQKKK
PTLKQIAKEILVNEEDIKGYRVTSTGKPEFTNLKVYHDIKDITARKEIIENAELLDQIAK
ILTIYQSSEDIQEELTNLNSELTQEEIEQISNLKGYTGTHNLSLKAINLILDELWHTNDN
QIAIFNRLKLVPKKVDLSQQKEIPTTLVDDFILSPVVKRSFIQSIKVINAIIKKYGLPNDII
IELAREKNSKDAQKMINEMQKRNRQTNERIEEIIRTTGKENAKYLIEKIKLHDMQEGK
CLYSLEAIPLEDLLNNPFNYEVDHIIPRSVSFDNSFNNKVLVKQEENSKKGNRTPFQY
LSSSDSKISYETFKKHILNLAKGKGRISKTKKEYLLEERDINRFSVQKDFINRNLVDTR
YATRGLMNLLRSYFRVNNLDVKVKSINGGFTSFLRRKWKFKKERNKGYKHHAEDA
LIIANADFIFKEWKKLDKAKKVMENQMFEEKQAESMPEIETEQEYKEIFITPHQIKHIK
DFKDYKYSHRVDKKPNRELINDTLYSTRKDDKGNTLIVNNLNGLYDKDNDKLKKLI
NKSPEKLLMYHHDPQTYQKLKLIMEQYGDEKNPLYKYYEETGNYLTKYSKKDNGP
VIKKIKYYGNKLNAHLDITDDYPNSRNKVVKLSLKPYRFDVYLDNGVYKFVTVKNL
DVIKKENYYEVNSKCYEEAKKLKKISNQAEFIASFYNNDLIKINGELYRVIGVNNDLL
NRIEVNMIDITYREYLENMNDKRPPRIIKTIASKTQSIKKYSTDILGNLYEVKSKKHPQI
IKKGSGGSKRTADGSEFEPKKKRKV
SaKKH-ABE8e-dimer
(SEQ ID NO: 215)
MKRTADGSEFESPKKKRKVSEVEFSHEYWMRHALTLAKRAWDEREVPVGAVLVHN
NRVIGEGWNRPIGRHDPTAHAEIMALRQGGLVMQNYRLIDATLYVTLEPCVMCAGA
MIHSRIGRVVFGARDAKTGAAGSLMDVLHHPGMNHRVEITEGILADECAALLSDFFR
MRRQEIKAQKKAQSSTDSGGSSGGSSGSETPGTSESATPESSGGSSGGSSEVEFSHEY
WMRHALTLAKRARDEREVPVGAVLVLNNRVIGEGWNRAIGLHDPTAHAEIMALRQ
GGLVMQNYRLIDATLYVTFEPCVMCAGAMIHSRIGRVVFGVRNSKRGAAGSLMNV
LNYPGMNHRVEITEGILADECAALLCDFYRMPRQVFNAQKKAQSSINSGGSSGGSSG
SETPGTSESATPESSGGSSGGSGKRNYILGLAIGITSVGYGIIDYETRDVIDAGVRLFKE
ANVENNEGRRSKRGARRLKRRRRHRIQRVKKLLFDYNLLTDHSELSGINPYEARVK
GLSQKLSEEEFSAALLHLAKRRGVHNVNEVEEDTGNELSTKEQISRNSKALEEKYVA
ELQLERLKKDGEVRGSINRFKTSDYVKEAKQLLKVQKAYHQLDQSFIDTYIDLLETR
RTYYEGPGEGSPFGWKDIKEWYEMLMGHCTYFPEELRSVKYAYNADLYNALNDLN
NLVITRDENEKLEYYEKFQIIENVFKQKKKPTLKQIAKEILVNEEDIKGYRVTSTGKPE
FTNLKVYHDIKDITARKEIIENAELLDQIAKILTIYQSSEDIQEELTNLNSELTQEEIEQIS
NLKGYTGTHNLSLKAINLILDELWHTNDNQIAIFNRLKLVPKKVDLSQQKEIPTTLVD
DFILSPVVKRSFIQSIKVINAIIKKYGLPNDIIIELAREKNSKDAQKMINEMQKRNRQTN
ERIEEIIRTTGKENAKYLIEKIKLHDMQEGKCLYSLEAIPLEDLLNNPFNYEVDHIIPRS
VSFDNSFNNKVLVKQEENSKKGNRTPFQYLSSSDSKISYETFKKHILNLAKGKGRISK
TKKEYLLEERDINRFSVQKDFINRNLVDTRYATRGLMNLLRSYFRVNNLDVKVKSIN
GGFTSFLRRKWKFKKERNKGYKHHAEDALIIANADFIFKEWKKLDKAKKVMENQM
FEEKQAESMPEIETEQEYKEIFITPHQIKHIKDFKDYKYSHRVDKKPNRELINDTLYST
RKDDKGNTLIVNNLNGLYDKDNDKLKKLINKSPEKLLMYHHDPQTYQKLKLIMEQY
GDEKNPLYKYYEETGNYLTKYSKKDNGPVIKKIKYYGNKLNAHLDITDDYPNSRNK
VVKLSLKPYRFDVYLDNGVYKFVTVKNLDVIKKENYYEVNSKCYEEAKKLKKISNQ
AEFIASFYNNDLIKINGELYRVIGVNNDLLNRIEVNMIDITYREYLENMNDKRPPRIIK
TIASKTQSIKKYSTDILGNLYEVKSKKHPQIIKKGSGGSKRTADGSEFEPKKKRKV
CP1028-ABE8e
(SEQ ID NO: 216)
MKRTADGSEFESPKKKRKVSEVEFSHEYWMRHALTLAKRARDEREVPVGAVLVLN
NRVIGEGWNRAIGLHDPTAHAEIMALRQGGLVMQNYRLIDATLYVTFEPCVMCAGA
MIHSRIGRVVFGVRNSKRGAAGSLMNVLNYPGMNHRVEITEGILADECAALLCDFY
RMPRQVFNAQKKAQSSINSGGSSGGSSGSETPGTSESATPESSGGSSGGSEIGKATAK
YFFYSNIMNFFKTEITLANGEIRKRPLIETNGETGEIVWDKGRDFATVRKVLSMPQVN
IVKKTEVQTGGFSKESILPKRNSDKLIARKKDWDPKKYGGFDSPTVAYSVLVVAKVE
KGKSKKLKSVKELLGITIMERSSFEKNPIDFLEAKGYKEVKKDLIIKLPKYSLFELENG
RKRMLASAGELQKGNELALPSKYVNFLYLASHYEKLKGSPEDNEQKQLFVEQHKH
YLDEIIEQISEFSKRVILADANLDKVLSAYNKHRDKPIREQAENIIHLFTLTNLGAPAAF
KYFDTTIDRKRYTSTKEVLDATLIHQSITGLYETRIDLSQLGGDGGSGGSGGSGGSGG
SGGSGGMDKKYSIGLAIGTNSVGWAVITDEYKVPSKKFKVLGNTDRHSIKKNLIGAL
LFDSGETAEATRLKRTARRRYTRRKNRICYLQEIFSNEMAKVDDSFFHRLEESFLVEE
DKKHERHPIFGNIVDEVAYHEKYPTIYHLRKKLVDSTDKADLRLIYLALAHMIKFRG
HFLIEGDLNPDNSDVDKLFIQLVQTYNQLFEENPINASGVDAKAILSARLSKSRRLEN
LIAQLPGEKKNGLFGNLIALSLGLTPNFKSNFDLAEDAKLQLSKDTYDDDLDNLLAQI
GDQYADLFLAAKNLSDAILLSDILRVNTEITKAPLSASMIKRYDEHHQDLTLLKALVR
QQLPEKYKEIFFDQSKNGYAGYIDGGASQEEFYKFIKPILEKMDGTEELLVKLNREDL
LRKQRTFDNGSIPHQIHLGELHAILRRQEDFYPFLKDNREKIEKILTFRIPYYVGPLAR
GNSRFAWMTRKSEETITPWNFEEVVDKGASAQSFIERMTNFDKNLPNEKVLPKHSLL
YEYFTVYNELTKVKYVTEGMRKPAFLSGEQKKAIVDLLFKTNRKVTVKQLKEDYFK
KIECFDSVEISGVEDRFNASLGTYHDLLKIIKDKDFLDNEENEDILEDIVLTLTLFEDRE
MIEERLKTYAHLFDDKVMKQLKRRRYTGWGRLSRKLINGIRDKQSGKTILDFLKSD
GFANRNFMQLIHDDSLTFKEDIQKAQVSGQGDSLHEHIANLAGSPAIKKGILQTVKV
VDELVKVMGRHKPENIVIEMARENQTTQKGQKNSRERMKRIEEGIKELGSQILKEHP
VENTQLQNEKLYLYYLQNGRDMYVDQELDINRLSDYDVDHIVPQSFLKDDSIDNKV
LTRSDKNRGKSDNVPSEEVVKKMKNYWRQLLNAKLITQRKFDNLTKAERGGLSEL
DKAGFIKRQLVETRQITKHVAQILDSRMNTKYDENDKLIREVKVITLKSKLVSDFRK
DFQFYKVREINNYHHAHDAYLNAVVGTALIKKYPKLESEFVYGDYKVYDVRKMIA
KSEQSGGSKRTADGSEFEPKKKRKV
CP1028-ABE8e-dimer
(SEQ ID NO: 217)
MKRTADGSEFESPKKKRKVSEVEFSHEYWMRHALTLAKRAWDEREVPVGAVLVHN
NRVIGEGWNRPIGRHDPTAHAEIMALRQGGLVMQNYRLIDATLYVTLEPCVMCAGA
MIHSRIGRVVFGARDAKTGAAGSLMDVLHHPGMNHRVEITEGILADECAALLSDFFR
MRRQEIKAQKKAQSSTDSGGSSGGSSGSETPGTSESATPESSGGSSGGSSEVEFSHEY
WMRHALTLAKRARDEREVPVGAVLVLNNRVIGEGWNRAIGLHDPTAHAEIMALRQ
GGLVMQNYRLIDATLYVTFEPCVMCAGAMIHSRIGRVVFGVRNSKRGAAGSLMNV
LNYPGMNHRVEITEGILADECAALLCDFYRMPRQVFNAQKKAQSSINSGGSSGGSSG
SETPGTSESATPESSGGSSGGSEIGKATAKYFFYSNIMNFFKTEITLANGEIRKRPLIET
NGETGEIVWDKGRDFATVRKVLSMPQVNIVKKTEVQTGGFSKESILPKRNSDKLIAR
KKDWDPKKYGGFDSPTVAYSVLVVAKVEKGKSKKLKSVKELLGITIMERSSFEKNPI
DFLEAKGYKEVKKDLIIKLPKYSLFELENGRKRMLASAGELQKGNELALPSKYVNFL
YLASHYEKLKGSPEDNEQKQLFVEQHKHYLDEIIEQISEFSKRVILADANLDKVLSAY
NKHRDKPIREQAENIIHLFTLTNLGAPAAFKYFDTTIDRKRYTSTKEVLDATLIHQSIT
GLYETRIDLSQLGGDGGSGGSGGSGGSGGSGGSGGMDKKYSIGLAIGTNSVGWAVIT
DEYKVPSKKFKVLGNTDRHSIKKNLIGALLFDSGETAEATRLKRTARRRYTRRKNRI
CYLQEIFSNEMAKVDDSFFHRLEESFLVEEDKKHERHPIFGNIVDEVAYHEKYPTIYH
LRKKLVDSTDKADLRLIYLALAHMIKFRGHFLIEGDLNPDNSDVDKLFIQLVQTYNQ
LFEENPINASGVDAKAILSARLSKSRRLENLIAQLPGEKKNGLFGNLIALSLGLTPNFK
SNFDLAEDAKLQLSKDTYDDDLDNLLAQIGDQYADLFLAAKNLSDAILLSDILRVNT
EITKAPLSASMIKRYDEHHQDLTLLKALVRQQLPEKYKEIFFDQSKNGYAGYIDGGA
SQEEFYKFIKPILEKMDGTEELLVKLNREDLLRKQRTFDNGSIPHQIHLGELHAILRRQ
EDFYPFLKDNREKIEKILTFRIPYYVGPLARGNSRFAWMTRKSEETITPWNFEEVVDK
GASAQSFIERMTNFDKNLPNEKVLPKHSLLYEYFTVYNELTKVKYVTEGMRKPAFLS
GEQKKAIVDLLFKTNRKVTVKQLKEDYFKKIECFDSVEISGVEDRFNASLGTYHDLL
KIIKDKDFLDNEENEDILEDIVLTLTLFEDREMIEERLKTYAHLFDDKVMKQLKRRRY
TGWGRLSRKLINGIRDKQSGKTILDFLKSDGFANRNFMQLIHDDSLTFKEDIQKAQVS
GQGDSLHEHIANLAGSPAIKKGILQTVKVVDELVKVMGRHKPENIVIEMARENQTTQ
KGQKNSRERMKRIEEGIKELGSQILKEHPVENTQLQNEKLYLYYLQNGRDMYVDQE
LDINRLSDYDVDHIVPQSFLKDDSIDNKVLTRSDKNRGKSDNVPSEEVVKKMKNYW
RQLLNAKLITQRKFDNLTKAERGGLSELDKAGFIKRQLVETRQITKHVAQILDSRMN
TKYDENDKLIREVKVITLKSKLVSDFRKDFQFYKVREINNYHHAHDAYLNAVVGTA
LIKKYPKLESEFVYGDYKVYDVRKMIAKSEQSGGSKRTADGSEFEPKKKRKV
CP1041-ABE8e
(SEQ ID NO: 218)
MKRTADGSEFESPKKKRKVSEVEFSHEYWMRHALTLAKRARDEREVPVGAVLVLN
NRVIGEGWNRAIGLHDPTAHAEIMALRQGGLVMQNYRLIDATLYVTFEPCVMCAGA
MIHSRIGRVVFGVRNSKRGAAGSLMNVLNYPGMNHRVEITEGILADECAALLCDFY
RMPRQVFNAQKKAQSSINSGGSSGGSSGSETPGTSESATPESSGGSSGGSNIMNFFKT
EITLANGEIRKRPLIETNGETGEIVWDKGRDFATVRKVLSMPQVNIVKKTEVQTGGFS
KESILPKRNSDKLIARKKDWDPKKYGGFDSPTVAYSVLVVAKVEKGKSKKLKSVKE
LLGITIMERSSFEKNPIDFLEAKGYKEVKKDLIIKLPKYSLFELENGRKRMLASAGELQ
KGNELALPSKYVNFLYLASHYEKLKGSPEDNEQKQLFVEQHKHYLDEIIEQISEFSKR
VILADANLDKVLSAYNKHRDKPIREQAENIIHLFTLTNLGAPAAFKYFDTTIDRKRYT
STKEVLDATLIHQSITGLYETRIDLSQLGGDGGSGGSGGSGGSGGSGGSGGDKKYSIG
LAIGTNSVGWAVITDEYKVPSKKFKVLGNTDRHSIKKNLIGALLFDSGETAEATRLK
RTARRRYTRRKNRICYLQEIFSNEMAKVDDSFFHRLEESFLVEEDKKHERHPIFGNIV
DEVAYHEKYPTIYHLRKKLVDSTDKADLRLIYLALAHMIKFRGHFLIEGDLNPDNSD
VDKLFIQLVQTYNQLFEENPINASGVDAKAILSARLSKSRRLENLIAQLPGEKKNGLF
GNLIALSLGLTPNFKSNFDLAEDAKLQLSKDTYDDDLDNLLAQIGDQYADLFLAAKN
LSDAILLSDILRVNTEITKAPLSASMIKRYDEHHQDLTLLKALVRQQLPEKYKEIFFDQ
SKNGYAGYIDGGASQEEFYKFIKPILEKMDGTEELLVKLNREDLLRKQRTFDNGSIPH
QIHLGELHAILRRQEDFYPFLKDNREKIEKILTFRIPYYVGPLARGNSRFAWMTRKSE
ETITPWNFEEVVDKGASAQSFIERMTNFDKNLPNEKVLPKHSLLYEYFTVYNELTKV
KYVTEGMRKPAFLSGEQKKAIVDLLFKTNRKVTVKQLKEDYFKKIECFDSVEISGVE
DRFNASLGTYHDLLKIIKDKDFLDNEENEDILEDIVLTLTLFEDREMIEERLKTYAHLF
DDKVMKQLKRRRYTGWGRLSRKLINGIRDKQSGKTILDFLKSDGFANRNFMQLIHD
DSLTFKEDIQKAQVSGQGDSLHEHIANLAGSPAIKKGILQTVKVVDELVKVMGRHKP
ENIVIEMARENQTTQKGQKNSRERMKRIEEGIKELGSQILKEHPVENTQLQNEKLYLY
YLQNGRDMYVDQELDINRLSDYDVDHIVPQSFLKDDSIDNKVLTRSDKNRGKSDNV
PSEEVVKKMKNYWRQLLNAKLITQRKFDNLTKAERGGLSELDKAGFIKRQLVETRQ
ITKHVAQILDSRMNTKYDENDKLIREVKVITLKSKLVSDFRKDFQFYKVREINNYHH
AHDAYLNAVVGTALIKKYPKLESEFVYGDYKVYDVRKMIAKSEQEIGKATAKYFFY
SSGGSKRTADGSEFEPKKKRKV
ABE8e(TadA-8e V82G)
(SEQ ID NO: 219)
MKRTADGSEFESPKKKRKVSEVEFSHEYWMRHALTLAKRARDEREVPVGAVLVLN
NRVIGEGWNRAIGLHDPTAHAEIMALRQGGLVMQNYRLIDATLYVTFEPCVMCAGA
MIHSRIGRVVFGVRNSKRGAAGSLMNVLNYPGMNHRVEITEGILADECAALLCDFY
RMPRQVFNAQKKAQSSINSGGSSGGSSGSETPGTSESATPESSGGSSGGSDKKYSIGL
AIGTNSVGWAVITDEYKVPSKKFKVLGNTDRHSIKKNLIGALLFDSGETAEATRLKR
TARRRYTRRKNRICYLQEIFSNEMAKVDDSFFHRLEESFLVEEDKKHERHPIFGNIVD
EVAYHEKYPTIYHLRKKLVDSTDKADLRLIYLALAHMIKFRGHFLIEGDLNPDNSDV
DKLFIQLVQTYNQLFEENPINASGVDAKAILSARLSKSRRLENLIAQLPGEKKNGLFG
NLIALSLGLTPNFKSNFDLAEDAKLQLSKDTYDDDLDNLLAQIGDQYADLFLAAKNL
SDAILLSDILRVNTEITKAPLSASMIKRYDEHHQDLTLLKALVRQQLPEKYKEIFFDQS
KNGYAGYIDGGASQEEFYKFIKPILEKMDGTEELLVKLNREDLLRKQRTFDNGSIPH
QIHLGELHAILRRQEDFYPFLKDNREKIEKILTFRIPYYVGPLARGNSRFAWMTRKSE
ETITPWNFEEVVDKGASAQSFIERMTNFDKNLPNEKVLPKHSLLYEYFTVYNELTKV
KYVTEGMRKPAFLSGEQKKAIVDLLFKTNRKVTVKQLKEDYFKKIECFDSVEISGVE
DRFNASLGTYHDLLKIIKDKDFLDNEENEDILEDIVLTLTLFEDREMIEERLKTYAHLF
DDKVMKQLKRRRYTGWGRLSRKLINGIRDKQSGKTILDFLKSDGFANRNFMQLIHD
DSLTFKEDIQKAQVSGQGDSLHEHIANLAGSPAIKKGILQTVKVVDELVKVMGRHKP
ENIVIEMARENQTTQKGQKNSRERMKRIEEGIKELGSQILKEHPVENTQLQNEKLYLY
YLQNGRDMYVDQELDINRLSDYDVDHIVPQSFLKDDSIDNKVLTRSDKNRGKSDNV
PSEEVVKKMKNYWRQLLNAKLITQRKFDNLTKAERGGLSELDKAGFIKRQLVETRQ
ITKHVAQILDSRMNTKYDENDKLIREVKVITLKSKLVSDFRKDFQFYKVREINNYHH
AHDAYLNAVVGTALIKKYPKLESEFVYGDYKVYDVRKMIAKSEQEIGKATAKYFFY
SNIMNFFKTEITLANGEIRKRPLIETNGETGEIVWDKGRDFATVRKVLSMPQVNIVKK
TEVQTGGFSKESILPKRNSDKLIARKKDWDPKKYGGFDSPTVAYSVLVVAKVEKGK
SKKLKSVKELLGITIMERSSFEKNPIDFLEAKGYKEVKKDLIIKLPKYSLFELENGRKR
MLASAGELQKGNELALPSKYVNFLYLASHYEKLKGSPEDNEQKQLFVEQHKHYLDE
IIEQISEFSKRVILADANLDKVLSAYNKHRDKPIREQAENIIHLFTLTNLGAPAAFKYF
DTTIDRKRYTSTKEVLDATLIHQSITGLYETRIDLSQLGGDSGGSKRTADGSEFEPKK
KRKV
ABE8e(TadA-8e K20AR21A)
(SEQ ID NO: 220)
MKRTADGSEFESPKKKRKVSEVEFSHEYWMRHALTLAKRARDEREVPVGAVLVLN
NRVIGEGWNRAIGLHDPTAHAEIMALRQGGLVMQNYRLIDATLYVTFEPCVMCAGA
MIHSRIGRVVFGVRNSKRGAAGSLMNVLNYPGMNHRVEITEGILADECAALLCDFY
RMPRQVFNAQKKAQSSINSGGSSGGSSGSETPGTSESATPESSGGSSGGSDKKYSIGL
AIGTNSVGWAVITDEYKVPSKKFKVLGNTDRHSIKKNLIGALLFDSGETAEATRLKR
TARRRYTRRKNRICYLQEIFSNEMAKVDDSFFHRLEESFLVEEDKKHERHPIFGNIVD
EVAYHEKYPTIYHLRKKLVDSTDKADLRLIYLALAHMIKFRGHFLIEGDLNPDNSDV
DKLFIQLVQTYNQLFEENPINASGVDAKAILSARLSKSRRLENLIAQLPGEKKNGLFG
NLIALSLGLTPNFKSNFDLAEDAKLQLSKDTYDDDLDNLLAQIGDQYADLFLAAKNL
SDAILLSDILRVNTEITKAPLSASMIKRYDEHHQDLTLLKALVRQQLPEKYKEIFFDQS
KNGYAGYIDGGASQEEFYKFIKPILEKMDGTEELLVKLNREDLLRKQRTFDNGSIPH
QIHLGELHAILRRQEDFYPFLKDNREKIEKILTFRIPYYVGPLARGNSRFAWMTRKSE
ETITPWNFEEVVDKGASAQSFIERMTNFDKNLPNEKVLPKHSLLYEYFTVYNELTKV
KYVTEGMRKPAFLSGEQKKAIVDLLFKTNRKVTVKQLKEDYFKKIECFDSVEISGVE
DRFNASLGTYHDLLKIIKDKDFLDNEENEDILEDIVLTLTLFEDREMIEERLKTYAHLF
DDKVMKQLKRRRYTGWGRLSRKLINGIRDKQSGKTILDFLKSDGFANRNFMQLIHD
DSLTFKEDIQKAQVSGQGDSLHEHIANLAGSPAIKKGILQTVKVVDELVKVMGRHKP
ENIVIEMARENQTTQKGQKNSRERMKRIEEGIKELGSQILKEHPVENTQLQNEKLYLY
YLQNGRDMYVDQELDINRLSDYDVDHIVPQSFLKDDSIDNKVLTRSDKNRGKSDNV
PSEEVVKKMKNYWRQLLNAKLITQRKFDNLTKAERGGLSELDKAGFIKRQLVETRQ
ITKHVAQILDSRMNTKYDENDKLIREVKVITLKSKLVSDFRKDFQFYKVREINNYHH
AHDAYLNAVVGTALIKKYPKLESEFVYGDYKVYDVRKMIAKSEQEIGKATAKYFFY
SNIMNFFKTEITLANGEIRKRPLIETNGETGEIVWDKGRDFATVRKVLSMPQVNIVKK
TEVQTGGFSKESILPKRNSDKLIARKKDWDPKKYGGFDSPTVAYSVLVVAKVEKGK
SKKLKSVKELLGITIMERSSFEKNPIDFLEAKGYKEVKKDLIIKLPKYSLFELENGRKR
MLASAGELQKGNELALPSKYVNFLYLASHYEKLKGSPEDNEQKQLFVEQHKHYLDE
IIEQISEFSKRVILADANLDKVLSAYNKHRDKPIREQAENIIHLFTLTNLGAPAAFKYF
DTTIDRKRYTSTKEVLDATLIHQSITGLYETRIDLSQLGGDSGGSKRTADGSEFEPKK
KRKV
ABE8e(TadA-8e V106W)
(SEQ ID NO: 473)
MKRTADGSEFESPKKKRKVSEVEFSHEYWMRHALTLAKRARDEREVPVGAVLVLNNRVIGE
GWNRAIGLHDPTAHAEIMALRQGGLVMQNYRLIDATLYVTFEPCVMCAGAMIHSRIGRVVFG
WRNSKRGAAGSLMNVLNYPGMNHRVEITEGILADECAALLCDFYRMPRQVFNAQKKAQSSI
NSGGSSGGSSGSETPGTSESATPESSGGSSGGSDKKYSIGLAIGTNSVGWAVITDEYKVPSKKF
KVLGNTDRHSIKKNLIGALLFDSGETAEATRLKRTARRRYTRRKNRICYLQEIFSNEMAKVDD
SFFHRLEESFLVEEDKKHERHPIFGNIVDEVAYHEKYPTIYHLRKKLVDSTDKADLRLIYLALA
HMIKFRGHFLIEGDLNPDNSDVDKLFIQLVQTYNQLFEENPINASGVDAKAILSARLSKSRRLE
NLIAQLPGEKKNGLFGNLIALSLGLTPNFKSNFDLAEDAKLQLSKDTYDDDLDNLLAQIGDQY
ADLFLAAKNLSDAILLSDILRVNTEITKAPLSASMIKRYDEHHQDLTLLKALVRQQLPEKYKEI
FFDQSKNGYAGYIDGGASQEEFYKFIKPILEKMDGTEELEVKLNREDLLRKQRTFDNGSIPHQI
HLGELHAILRRQEDFYPFLKDNREKIEKILTFRIPYYVGPLARGNSRFAWMTRKSEETITPWNF
EEVVDKGASAQSFIERMTNFDKNLPNEKVLPKHSLLYEYFTVYNELTKVKYVTEGMRKPAFL
SGEQKKAIVDLLFKTNRKVTVKQLKEDYFKKIECFDSVEISGVEDRFNASLGTYHDLLKIIKD
KDFLDNEENEDILEDIVLTLTLFEDREMIEERLKTYAHLFDDKVMKQLKRRRYTGWGRLSRK
LINGIRDKQSGKTILDFLKSDGFANRNFMQLIHDDSLTFKEDIQKAQVSGQGDSLHEHIANLA
GSPAIKKGILQTVKVVDELVKVMGRHKPENIVIEMARENQTTQKGQKNSRERMKRIEEGIKEL
GSQILKEHPVENTQLQNEKLYEYYLQNGRDMYVDQELDINRLSDYDVDHIVPQSFLKDDSID
NKVLTRSDKNRGKSDNVPSEEVVKKMKNYWRQLLNAKLITQRKFDNLTKAERGGLSELDK
AGFIKRQLVETRQITKHVAQILDSRMNTKYDENDKLIREVKVITLKSKLVSDFRKDFQFYKVR
EINNYHHAHDAYLNAVVGTALIKKYPKLESEFVYGDYKVYDVRKMIAKSEQEIGKATAKYFF
YSNIMNFFKTEITLANGEIRKRPLIETNGETGEIVWDKGRDFATVRKVLSMPQVNIVKKTEVQ
TGGFSKESILPKRNSDKLIARKKDWDPKKYGGFDSPTVAYSVLVVAKVEKGKSKKLKSVKEL
LGITIMERSSFEKNPIDFLEAKGYKEVKKDLIIKLPKYSLFELENGRKRMLASAGELQKGNELA
LPSKYVNFLYLASHYEKLKGSPEDNEQKQLFVEQHKHYLDEIIEQISEFSKRVILADANLDKVL
SAYNKHRDKPIREQAENIIHLFTLTNLGAPAAFKYFDTTIDRKRYTSTKEVLDATLIHQSITGEY
ETRIDLSQLGGDSGGSKRTADGSEFEPKKKRKV
ABE8e-NRTH dimer editor: NLS, wtTadA, linker, TadA*, SpCas9-NRTH
(SEQ ID NO: 474)
MKRTADGSEFESPKKKRKVSEVEFSHEYWMRHALTLAKRAWDEREVPVGAVLVHNNRVI
GEGWNRPIGRHDPTAHAEIMALRQGGLVMQNYRLIDATLYVTLEPCVMCAGAMIHSRI
GRVVFGARDAKTGAAGSLMDVLHHPGMNHRVEITEGILADECAALLSDFFRMRRQEIK
AQKKAQSSTDSGGSSGGSSGSETPGTSESATPESSGGSSGGSSEVEFSHEYWMRHALTLAKRAR
DEREVPVGAVLVLNNRVIGEGWNRAIGLHDPTAHAEIMALRQGGLVMQNYRLIDATLYVTFEPCVM
CAGAMIHSRIGRWFGVRNSKRGAAGSLMNVLNYPGMNHRVEITEGILADECAALLCDFYRMPRQ
VFNAQKKAQSSINSGGSSGGSSGSEYPGYSESKPPESSGGSSGGSDKKYSIGLAIGTNSVGWAVITD
EYKVPSKKFKVLGNTDRHSIKKNLIGALLFDSGETAEATRLKRTARRRYTRRKNRICYLQEIFSNEMA
KVDDSFFHRLEESFLVEEDKKHERHPIFGNIVDEVAYHEKYPTIYHLRKKLVDSTDKADLRLIYLALA
HMIKFRGHFLIEGDLNPDNSDVDKLFIQLVQTYNQLFEENPINASGVDAKAILSARLSKSRRLENLIA
QLPGEKKNGLFGNLIALSLGLTPNFKSNFDLAEDAKLQLSKDTYDDDLDNLLAQIGDQYADLFLAA
KNLSDAILLSDILRVNTEITKAPLSASMVKRYDEHHQDLTLLKALVRQQLPEKYKEIFFDQSKNGYA
GYIDGGASQEEFYKFIKPILEKMDGTEELLVKLNREDLLRKQRTFDNGIIPHQIHLGELHAILRRQG
DFYPFLKDNREKIEKILTFRIPYYVGPLARGNSRFAWMTRKSEETITPWNFEEWDKGASAQSFIER
MTNFDKNLPNEKVLPKHSLLYEYFTVYNELTKVKYVTEGMRKPAFLSGEQKKAIVDLLFKTNRKVT
VKQLKEDYFKKIECFDSVEISGVEDRFNASLGTYHDLLKIIKDKDFLDNEENEDILEDIVLTLTLFED
REMIEERLKTYAHLFDDKVMKQLKRLRYTGWGRLSRKLINGIRDKQSGKTILDFLKSDGFANRNFM
QLIHDDSLTFKEDIQKAQVSCQGDSLHEHIANLAGSPAIKKGILQTVKWDELIKVMGGHKPENIVI
EMARENQTTQKGQKNSRERMKRIEEGIKELGSQILKEHPVENTQLQNEKLYLYYLQNGRDMYVDQ
ELDINRLSDYDVDHIVPQSFLKDDSIENKVLTRSDKNRGKSDNVPSEEWKKMKNYWRQLLNAKLI
TQRKFDNLTKAERGGLSELDKAGFIKRQLAETRQITKHVAQILDSRMNTKYDENDKLIREVKVITLK
SKLVSDFRKDFQFYKVREINNYHHAHDAYLNAWGTALIKKYPKLESEFVYGDYKVYDVRKMIAKSE
QEIGKATAKYFFYSNIMNFFKTEITLANGEIRKRPLIETNGETGEIVWDKGRDFATVRKVLSMPQVNI
VKKTEVQTGGFSKESILPKGNSDKLIARKKDWDPKKYGGFNSPTVAYSVLWAKVEKGKSKKLKSV
KELLGITIMERSSFEKNPIGFLEAKGYKEVKKDLIIKLPKYSLFELENGRKRMLASASVLHKGNELAL
PSKYVNFLYLASHYEKLKGSSEDNKQKQLFVEQHKHYLDEIIEQISEFSKRVILADANLDKVLSAYNK
HRDKPIREQAENIIHLFTLTNLGASAAFKYFDTTIGRKLYTSTKEVLDATLIHQSITGLYETRIDLSQLG
GDSGGSKRTADGSEFEPKKKRKV
ABE8e-NRTH monomer editor: NLS, linker, TadA*, SpCas9-NRTH
(SEQ ID NO: 475)
MKKTADGSEYESPKKKRKVSEVEFSHEYWMRHALTLAKRARDEREVPVGAVLVLNNRVIGEGWN
RAIGLHDPTAHAEIMALRQGGLVMQNYRLIDATLYVTFEPCVMCAGAMIHSRIGRWFGVRNSKRG
AAGSLMNVLNYPGMNHRVEITEGILADECAALLCDFYRMPRQVFNAQKKAQSSINSGGSSGGSSG
SEYPGYSESATPESSGGSSGGSDKKYSIGLAIGTNSVGWAVITDEYKVPSKKFKVLGNTDRHSIKKN
LIGALLFDSGETAEATRLKRTARRRYTRRKNRICYLQEIFSNEMAKVDDSFFHRLEESFLVEEDKKHE
RHPIFGNIVDEVAYHEKYPTIYHLRKKLVDSTDKADLRLIYLALAHMIKFRGHFLIEGDLNPDNSDV
DKLFIQLVQTYNQLFEENPINASGVDAKAILSARLSKSRRLENLIAQLPGEKKNGLFGNLIALSLGLT
PNFKSNFDLAEDAKLQLSKDTYDDDLDNLLAQIGDQYADLFLAAKNLSDAILLSDILRVNTEITKAP
LSASMVKRYDEHHQDLTLLKALVRQQLPEKYKEIFFDQSKNGYAGYIDGGASQEEFYKFIKPILEK
MDGTEELLVKLNREDLLRKQRTFDNGIIPHQIHLGELHAILRRQGDFYPFLKDNREKIEKILTFRIP
YYVGPLARGNSRFAWMTRKSEETITPWNFEEWDKGASAQSFIERMTNFDKNLPNEKVLPKHSLLY
EYFTVYNELTKVKYVTEGMRKPAFLSGEQKKAIVDLLFKTNRKVTVKQLKEDYFKKIECFDSVEISG
VEDRFNASLGTYHDLLKIIKDKDFLDNEENEDILEDIVLTLTLFEDREMIEERLKTYAHLFDDKVMK
QLKRLRYTGWGRLSRKLINGIRDKQSGKTILDFLKSDGFANRNFMQLIHDDSLTFKEDIQKAQVSC
QGDSLHEHIANLAGSPAIKKGILQTVKWDELIKVMGGHKPENIVIEMARENQTTQKGQKNSRERM
KRIEEGIKELGSQILKEHPVENTQLQNEKLYLYYLQNGRDMYVDQELDINRLSDYDVDHIVPQSFLK
DDSIENKVLTRSDKNRGKSDNVPSEEWKKMKNYWRQLLNAKLITQRKFDNLTKAERGGLSELDK
AGFIKRQLAETRQITKHVAQILDSRMNTKYDENDKLIREVKVITLKSKLVSDFRKDFQFYKVREINNY
HHAHDAYLNAWGTALIKKYPKLESEFVYGDYKVYDVRKMIAKSEQEIGKATAKYFFYSNIMNFFKT
EITLANGEIRKRPLIETNGETGEIVWDKGRDFATVRKVLSMPQVNIVKKTEVQTGGFSKESILPKGNS
DKLIARKKDWDPKKYGGFNSPTVAYSVLWAKVEKGKSKKLKSVKELLGITIMERSSFEKNPIGFLE
AKGYKEVKKDLIIKLPKYSLFELENGRKRMLASASVLHKGNELALPSKYVNFLYLASHYEKLKGSSE
DNKQKQLFVEQHKHYLDEIIEQISEFSKRVILADANLDKVLSAYNKHRDKPIREQAENIIHLFTLTNL
GASAAFKYFDTTIGRKLYTSTKEVLDATLIHQSITGLYETRIDLSQLGGDSGGSKRTADGSEFEPKK
KRKV
ABE8e-SpyMac dimer editor: NLS, wtTadA, linker, TadA*, SpCas9-SpyMac
(SEQ ID NO: 476)
MKRTADGSEFESPKKKRKVSEVEFSHEYWMRHALTLAKRAWDEREVPVGAVLVHNNRVI
GEGWNRPIGRHDPTAHAEIMALRQGGLVMQNYRLIDATLYVTLEPCVMCAGAMIHSRI
GRVVFGARDAKTGAAGSLMDVLHHPGMNHRVEITEGILADECAALLSDFFRMRRQEIK
AQKKAQSSTDSGGSSGGSSGSETPGTSESATPESSGGSSGGSSEVEFSHEYWMRHALTLAKRAR
DEREVPVGAVLVLNNRVIGEGWNRAIGLHDPTAHAEIMALRQGGLVMQNYRLIDATLYVTFEPCVM
CAGAMIHSRIGRWFGVRNSKRGAAGSLMNVLNYPGMNHRVEITEGILADECAALLCDFYRMPRQ
VFNAQKKAQSSINSGGSSGGSSGSEYYGYSESKVYESSGGSSGGSDKKYSIGLAIGTNSVGWAVITD
EYKVPSKKFKVLGNTDRHSIKKNLIGALLFDSGETAEATRLKRTARRRYTRRKNRICYLQEIFSNEMA
KVDDSFFHRLEESFLVEEDKKHERHPIFGNIVDEVAYHEKYPTIYHLRKKLVDSTDKADLRLIYLALA
HMIKFRGHFLIEGDLNPDNSDVDKLFIQLVQTYNQLFEENPINASGVDAKAILSARLSKSRRLENLIA
QLPGEKKNGLFGNLIALSLGLTPNFKSNFDLAEDAKLQLSKDTYDDDLDNLLAQIGDQYADLFLAA
KNLSDAILLSDILRVNTEITKAPLSASMIKRYDEHHQDLTLLKALVRQQLPEKYKEIFFDQSKNGYAG
YIDGGASQEEFYKFIKPILEKMDGTEELLVKLNREDLLRKQRTFDNGSIPHQIHLGELHAILRRQED
FYPFLKDNREKIEKILTFRIPYYVGPLARGNSRFAWMTRKSEETITPWNFEEWDKGASAQSFIERMT
NFDKNLPNEKVLPKHSLLYEYFTVYNELTKVKYVTEGMRKPAFLSGEQKKAIVDLLFKTNRKVTVK
QLKEDYFKKIECFDSVEISGVEDRFNASLGTYHDLLKIIKDKDFLDNEENEDILEDIVLTLTLFEDRE
MIEERLKTYAHLFDDKVMKQLKRRRYTGWGRLSRKLINGIRDKQSGKTILDFLKSDGFANRNFMQL
IHDDSLTFKEDIQKAQVSGQGDSLHEHIANLAGSPAIKKGILQTVKWDELVKVMGRHKPENIVIEM
ARENQTTQKGQKNSRERMKRIEEGIKELGSQILKEHPVENTQLQNEKLYLYYLQNGRDMYVDQEL
DINRLSDYDVDHIVPQSFLKDDSIDNKVLTRSDKNRGKSDNVPSEEWKKMKNYWRQLLNAKLITQ
RKFDNLTKAERGGLSELDKAGFIKRQLVETRQITKHVAQILDSRMNTKYDENDKLIREVKVITLKSK
LVSDFRKDFQFYKVREINNYHHAHDAYLNAWGTALIKKYPKLESEFVYGDYKVYDVRKMIAKSEQ
EIGKATAKYFFYSNIMNFFKTEITLANGEIRKRPLIETNGETGEIVWDKGRDFATVRKVLSMPQVNIV
KKTEIQTVGQNGGLFDDNPKSPLEVTPSKLVPLKKELNPKKYGGYQKPTTAYPVLLITDTKQLIPISV
MNKKQFEQNPVKFLRDRGYQQVGKNDFIKLPKYTLVDIGDGIKRLWASSKEIHKGNQLWSKKSQI
LLYHAHHLDSDLSNDYLQNHNQQFDVLFNEIISFSKKCKLGKEHIQKIENVYSNKKNSASIEELAES
FIKLLGFTQLGATSPFNFLGVKLNQKQYKGKKDYILPCTEGTLIRQSITGLYETRVDLSKIGEDSGGS
KRTADGSEFEPKKKRKV
ABE8e-SpyMac monomer editor: NLS, wtTadA, linker, TadA*, SpCas9-SpyMac
(SEQ ID NO: 477)
MKKPADGSEEESPKKKRKVSEVEFSHEYWMRHALTLAKRARDEREVPVGAVLVLNNRVIGEGWN
RAIGLHDPTAHAEIMALRQGGLVMQNYRLIDATLYVTFEPCVMCAGAMIHSRIGRWFGVRNSKRG
AAGSLMNVLNYPGMNHRVEITEGILADECAALLCDFYRMPRQVFNAQKKAQSSINSGGSSGGSSG
SETPGYSESAYPESSGGSSGGSDKKYSIGLAIGTNSVGWAVITDEYKVPSKKFKVLGNTDRHSIKKN
LIGALLFDSGETAEATRLKRTARRRYTRRKNRICYLQEIFSNEMAKVDDSFFHRLEESFLVEEDKKHE
RHPIFGNIVDEVAYHEKYPTIYHLRKKLVDSTDKADLRLIYLALAHMIKFRGHFLIEGDLNPDNSDV
DKLFIQLVQTYNQLFEENPINASGVDAKAILSARLSKSRRLENLIAQLPGEKKNGLFGNLIALSLGLT
PNFKSNFDLAEDAKLQLSKDTYDDDLDNLLAQIGDQYADLFLAAKNLSDAILLSDILRVNTEITKAP
LSASMIKRYDEHHQDLTLLKALVRQQLPEKYKEIFFDQSKNGYAGYIDGGASQEEFYKFIKPILEKM
DGTEELLVKLNREDLLRKQRTFDNGSIPHQIHLGELHAILRRQEDFYPFLKDNREKIEKILTFRIPYY
VGPLARGNSRFAWMTRKSEETITPWNFEEWDKGASAQSFIERMTNFDKNLPNEKVLPKHSLLYEY
FTVYNELTKVKYVTEGMRKPAFLSGEQKKAIVDLLFKTNRKVTVKQLKEDYFKKIECFDSVEISGVE
DRFNASLGTYHDLLKIIKDKDFLDNEENEDILEDIVLTLTLFEDREMIEERLKTYAHLFDDKVMKQL
KRRRYTGWGRLSRKLINGIRDKQSGKTILDFLKSDGFANRNFMQLIHDDSLTFKEDIQKAQVSGQG
DSLHEHIANLAGSPAIKKGILQTVKWDELVKVMGRHKPENIVIEMARENQTTQKGQKNSRERMKR
IEEGIKELGSQILKEHPVENTQLQNEKLYLYYLQNGRDMYVDQELDINRLSDYDVDHIVPQSFLKD
DSIDNKVLTRSDKNRGKSDNVPSEEWKKMKNYWRQLLNAKLITQRKFDNLTKAERGGLSELDKA
GFIKRQLVETRQITKHVAQILDSRMNTKYDENDKLIREVKVITLKSKLVSDFRKDFQFYKVREINNYH
HAHDAYLNAWGTALIKKYPKLESEFVYGDYKVYDVRKMIAKSEQEIGKATAKYFFYSNIMNFFKTEI
TLANGEIRKRPLIETNGETGEIVWDKGRDFATVRKVLSMPQVNIVKKTEIQTVGQNGGLFDDNPKS
PLEVTPSKLVPLKKELNPKKYGGYQKPTTAYPVLLITDTKQLIPISVMNKKQFEQNPVKFLRDRGYQ
QVGKNDFIKLPKYTLVDIGDGIKRLWASSKEIHKGNQLWSKKSQILLYHAHHLDSDLSNDYLQNH
NQQFDVLFNEIISFSKKCKLGKEHIQKIENVYSNKKNSASIEELAESFIKLLGFTQLGATSPFNFLGV
KLNQKQYKGKKDYILPCTEGTLIRQSITGLYETRVDLSKIGEDSGGSKRTADGSFEFEPKKKRKV
ABE8e-VRQR-CP1041 dimer: NLS, wtTadA, linker, TadA*, SpCas9-VRQR-CP1041
(SEQ ID NO: 478)
MKRTADGSEFESPKKKRKVSEVEFSHEYWMRHALTLAKRAWDEREVPVGAVLVHNNRVI
GEGWNRPIGRHDPTAHAEIMALRQGGLVMQNYRLIDATLYVTLEPCVMCAGAMIHSRI
GRVVFGARDAKTGAAGSLMDVLHHPGMNHRVEITEGILADECAALLSDFFRMRRQEIK
AQKKAQSSTDSGGSSGGSSGSETPGTSESATPESSGGSSGGSSEVEFSHEYWMRHALTLAKRAR
DEREVPVGAVLVLNNRVIGEGWNRAIGLHDPTAHAEIMALRQGGLVMQNYRLIDATLYVTFEPCVM
CAGAMIHSRIGRWFGVRNSKRGAAGSLMNVLNYPGMNHRVEITEGILADECAALLCDFYRMPRQ
VFNAQKKAQSSINSGGSSGGSSGSEYYGYSESKPYESSGGSSGGSNIMNFFKTEITLANGEIRKRPL
IETNGETGEIVWDKGRDFATVRKVLSMPQVNIVKKTEVQTGGFSKESIRPKRNSDKLIARKKDWDP
KKYGGFVSPTVAYSVLWAKVEKGKSKKLKSVKELLGITIMERSSFEKNPIDFLEAKGYKEVKKDLII
KLPKYSLFELENGRKRMLASARFLQKGNELALPSKYVNFLYLASHYEKLKGSPEDNEQKQLFVEQH
KHYLDEIIEQISEFSKRVILADANLDKVLSAYNKHRDKPIREQAENIIHLFTLTNLGAPRAFKYFDTTI
DRKVYRSTKEVLDATLIHQSITGLYETRIDLSQLGGDGGSGGSGGSGGSGGSGGSGGDKKYSIGLAI
GTNSVGWAVITDEYKVPSKKFKVLGNTDRHSIKKNLIGALLFDSGETAEATRLKRTARRRYTRRKNRI
CYLQEIFSNEMAKVDDSFFHRLEESFLVEEDKKHERHPIFGNIVDEVAYHEKYPTIYHLRKKLVDST
DKADLRLIYLALAHMIKFRGHFLIEGDLNPDNSDVDKLFIQLVQTYNQLFEENPINASGVDAKAILS
ARLSKSRRLENLIAQLPGEKKNGLFGNLIALSLGLTPNFKSNFDLAEDAKLQLSKDTYDDDLDNLLA
QIGDQYADLFLAAKNLSDAILLSDILRVNTEITKAPLSASMIKRYDEHHQDLTLLKALVRQQLPEKYK
EIFFDQSKNGYAGYIDGGASQEEFYKFIKPILEKMDGTEELLVKLNREDLLRKQRTFDNGSIPHQIH
LGELHAILRRQEDFYPFLKDNREKIEKILTFRIPYYVGPLARGNSRFAWMTRKSEETITPWNFEEWD
KGASAQSFIERMTNFDKNLPNEKVLPKHSLLYEYFTVYNELTKVKYVTEGMRKPAFLSGEQKKAIV
DLLFKTNRKVTVKQLKEDYFKKIECFDSVEISGVEDRFNASLGTYHDLLKIIKDKDFLDNEENEDIL
EDIVLTLTLFEDREMIEERLKTYAHLFDDKVMKQLKRRRYTGWGRLSRKLINGIRDKQSGKTILDFL
KSDGFANRNFMQLIHDDSLTFKEDIQKAQVSGQGDSLHEHIANLAGSPAIKKGILQTVKWDELVK
VMGRHKPENIVIEMARENQTTQKGQKNSRERMKRIEEGIKELGSQILKEHPVENTQLQNEKLYLYY
LQNGRDMYVDQELDINRLSDYDVDHIVPQSFLKDDSIDNKVLTRSDKNRGKSDNVPSEEWKKMK
NYWRQLLNAKLITQRKFDNLTKAERGGLSELDKAGFIKRQLVETRQITKHVAQILDSRMNTKYDEN
DKLIREVKVITLKSKLVSDFRKDFQFYKVREINNYHHAHDAYLNAWGTALIKKYPKLESEFVYGDY
KVYDVRKMIAKSEQEIGKATAKYFFYSSGGSKRTADGSEFEPKKKRKV
ABE8e-VRQR-CP1041 monomer: NLS, linker, TadA*, SpCas9-VRQR-CP1041
(SEQ ID NO: 479)
MKRTADGSEYESPKKKRKVSEVEFSHEYWMRHALTLAKRARDEREVPVGAVLVLNNRVIGEGWN
RAIGLHDPTAHAEIMALRQGGLVMQNYRLIDATLYVTFEPCVMCAGAMIHSRIGRWFGVRNSKRG
AAGSLMNVLNYPGMNHRVEITEGILADECAALLCDFYRMPRQVFNAQKKAQSSINSGGSSGGSSG
SETPGTSESATPESSGGSSGGSNIMNFFKTEITLANGEIRKRPLIETNGETGEIVWDKGRDFATVRK
VLSMPQVNIVKKTEVQTGGFSKESIRPKRNSDKLIARKKDWDPKKYGGFVSPTVAYSVLWAKVEK
GKSKKLKSVKELLGITIMERSSFEKNPIDFLEAKGYKEVKKDLIIKLPKYSLFELENGRKRMLASARF
LQKGNELALPSKYVNFLYLASHYEKLKGSPEDNEQKQLFVEQHKHYLDEIIEQISEFSKRVILADAN
LDKVLSAYNKHRDKPIREQAENIIHLFTLTNLGAPRAFKYFDTTIDRKVYRSTKEVLDATLIHQSITGL
YETRIDLSQLGGDGGSGGSGGSGGSGGSGGSGGDKKYSIGLAIGTNSVGWAVITDEYKVPSKKFKV
LGNTDRHSIKKNLIGALLFDSGETAEATRLKRTARRRYTRRKNRICYLQEIFSNEMAKVDDSFFHRLE
ESFLVEEDKKHERHPIFGNIVDEVAYHEKYPTIYHLRKKLVDSTDKADLRLIYLALAHMIKFRGHFLI
EGDLNPDNSDVDKLFIQLVQTYNQLFEENPINASGVDAKAILSARLSKSRRLENLIAQLPGEKKNGL
FGNLIALSLGLTPNFKSNFDLAEDAKLQLSKDTYDDDLDNLLAQIGDQYADLFLAAKNLSDAILLSD
ILRVNTEITKAPLSASMIKRYDEHHQDLTLLKALVRQQLPEKYKEIFFDQSKNGYAGYIDGGASQEE
FYKFIKPILEKMDGTEELLVKLNREDLLRKQRTFDNGSIPHQIHLGELHAILRRQEDFYPFLKDNRE
KIEKILTFRIPYYVGPLARGNSRFAWMTRKSEETITPWNFEEWDKGASAQSFIERMTNFDKNLPNE
KVLPKHSLLYEYFTVYNELTKVKYVTEGMRKPAFLSGEQKKAIVDLLFKTNRKVTVKQLKEDYFKKI
ECFDSVEISGVEDRFNASLGTYHDLLKIIKDKDFLDNEENEDILEDIVLTLTLFEDREMIEERLKTYA
HLFDDKVMKQLKRRRYTGWGRLSRKLINGIRDKQSGKTILDFLKSDGFANRNFMQLIHDDSLTFK
EDIQKAQVSGQGDSLHEHIANLAGSPAIKKGILQTVKWDELVKVMGRHKPENIVIEMARENQTTQ
KGQKNSRERMKRIEEGIKELGSQILKEHPVENTQLQNEKLYLYYLQNGRDMYVDQELDINRLSDYD
VDHIVPQSFLKDDSIDNKVLTRSDKNRGKSDNVPSEEVVKKMKNYWRQLLNAKLITQRKFDNLTKA
ERGGLSELDKAGFIKRQLVETRQITKHVAQILDSRMNTKYDENDKLIREVKVITLKSKLVSDFRKDF
QFYKVREINNYHHAHDAYLNAWGTALIKKYPKLESEFVYGDYKVYDVRKMIAKSEQEIGKATAKYF
FYSSGGSKRTADGSEFEPKKKRKV
ABE8e-SaCas9 dimer editor: NLS, wtTadA, linker, TadA*, SaCas9
(SEQ ID NO: 205)
MKRTADGSEFESPKKKRKVSEVEFSHEYWMRHALTLAKRAWDEREVPVGAVLVHNNRVI
GEGWNRPIGRHDPTAHAEIMALRQGGLVMQNYRLIDATLYVTLEPCVMCAGAMIHSRI
GRVVFGARDAKTGAAGSLMDVLHHPGMNHRVEITEGILADECAALLSDFFRMRRQEIK
AQKKAQSSTDSGGSSGGSSGSETPGTSESATPESSGGSSGGSSEVEFSHEYWMRHALTLAKRAR
DEREVPVGAVLVLNNRVIGEGWNRAIGLHDPTAHAEIMALRQGGLVMQNYRLIDATLYVTFEPCVM
CAGAMIHSRIGRWFGVRNSKRGAAGSLMNVLNYPGMNHRVEITEGILADECAALLCDFYRMPRQ
VFNAQKKAQSSINSGGSSGGSSGSEYYGYSESKVYESSGGSSGGSGKRNYILGLAIGITSVGYGIIDY
ETRDVIDAGVRLFKEANVENNEGRRSKRGARRLKRRRRHRIQRVKKLLFDYNLLTDHSELSGINPYE
ARVKGLSQKLSEEEFSAALLHLAKRRGVHNVNEVEEDTGNELSTKEQISRNSKALEEKYVAELQLER
LKKDGEVRGSINRFKTSDYVKEAKQLLKVQKAYHQLDQSFIDTYIDLLETRRTYYEGPGEGSPFGW
KDIKEWYEMEMGHCTYFPEELRSVKYAYNADLYNALNDLNNLVITRDENEKLEYYEKFQIIENVFKQ
KKKPTLKQIAKEILVNEEDIKGYRVTSTGKPEFTNLKVYHDIKDITARKEIIENAELLDQIAKILTIYQS
SEDIQEELTNLNSELTQEEIEQISNLKGYTGTHNLSLKAINLILDELWHTNDNQIAIFNRLKLVPKKVD
LSQQKEIPTTLVDDFILSPWKRSFIQSIKVINAIIKKYGLPNDIIIELAREKNSKDAQKMINEMQKRNR
QTNERIEEIIRTTGKENAKYLIEKIKLHDMQEGKCLYSLEAIPLEDLLNNPFNYEVDHIIPRSVSFDNS
FNNKVLVKQEENSKKGNRTPFQYLSSSDSKISYETFKKHILNLAKGKGR1SKTKKEYLLEERDINRFS
VQKDFINRNLVDTRYATRGLMNLLRSYFRVNNLDVKVKSINGGFTSFLRRKWKFKKERNKGYKHH
AEDALIIANADFIFKEWKKLDKAKKVMENQMFEEKQAESMPEIETEQEYKEIFITPHQIKHIKDFK
DYKYSHRVDKKPNRELINDTLYSTRKDDKGNTLIVNNLNGLYDKDNDKLKKLINKSPEKLEMYHHD
PQTYQKLKLIMEQYGDEKNPLYKYYEETGNYLTKYSKKDNGPVIKKIKYYGNKLNAHLDITDDYPN
SRNKWKLSLKPYRFDVYLDNGVYKFVTVKNLDVIKKENYYEVNSKCYEEAKKLKKISNQAEFIASF
YNNDLIKINGELYRVIGVNNDLLNRIEVNMIDITYREYLENMNDKRPPRIIKTIASKTQSIKKYSTDILG
NLYEVKSKKHPQIIKKGSGGSKRTADGSEFEPKKKRKV
ABE8e-SaCas9 monomer editor: NLS, linker, TadA*, SaCas9
(SEQ ID NO: 204)
MKKPADGSEEESPKKKRKVSEVEFSHEYWMRHALTLAKRARDEREVPVGAVLVLNNRVIGEGWN
RAIGLHDPTAHAEIMALRQGGLVMQNYRLIDATLYVTFEPCVMCAGAMIHSRIGRWFGVRNSKRG
AAGSLMNVLNYPGMNHRVEITEGILADECAALLCDFYRMPRQVFNAQKKAQSSINSGGSSGGSSG
SEYPGYSESATPESSGGSSGGSGKRNYILGLAIGITSVGYGIIDYETRDVIDAGVRLFKEANVENNEG
RRSKRGARRLKRRRRHRIQRVKKLLFDYNLLTDHSELSGINPYEARVKGLSQKLSEEEFSAALLHLA
KRRGVHNVNEVEEDTGNELSTKEQISRNSKALEEKYVAELQLERLKKDGEVRGSINRFKTSDYVKE
AKQLLKVQKAYHQLDQSFIDTYIDLLETRRTYYEGPGEGSPFGWKDIKEWYEMEMGHCTYFPEEL
RSVKYAYNADLYNALNDLNNLVITRDENEKLEYYEKFQIIENVFKQKKKPTLKQIAKEILVNEEDIKG
YRVTSTGKPEFTNLKVYHDIKDITARKEIIENAELLDQIAKILTIYQSSEDIQEELTNLNSELTQEEIEQI
SNLKGYTGTHNLSLKAINLILDELWHTNDNQIAIFNRLKLVPKKVDLSQQKEIPTTLVDDFILSPWK
RSFIQSIKVINAIIKKYGLPNDIIIELAREKNSKDAQKMINEMQKRNRQTNERIEEIIRTTGKENAKYLI
EKIKLHDMQEGKCLYSLEAIPLEDLLNNPFNYEVDHIIPRSVSFDNSFNNKVLVKQEENSKKGNRTP
FQYLSSSDSKISYETFKKHILNLAKGKGRISKTKKEYLLEERDINRFSVQKDFINRNLVDTRYATRGL
MNLLRSYFRVNNLDVKVKSINGGFTSFLRRKWKFKKERNKGYKHHAEDALIIANADFIFKEWKKLD
KAKKVMENQMFEEKQAESMPEIETEQEYKEIFITPHQIKHIKDFKDYKYSHRVDKKPNRELINDTL
YSTRKDDKGNTLIVNNLNGLYDKDNDKLKKLINKSPEKLEMYHHDPQTYQKLKLIMEQYGDEKNP
LYKYYEETGNYLTKYSKKDNGPVIKKIKYYGNKLNAHLDITDDYPNSRNKWKLSLKPYRFDVYLDN
GVYKFVTVKNLDVIKKENYYEVNSKCYEEAKKLKKISNQAEFIASFYNNDLIKINGELYRVIGVNNDL
LNRIEVNMIDITYREYLENMNDKRPPRIIKTIASKTQSIKKYSTDILGNLYEVKSKKHPQIIKKGSGGS
KRTADGSEFEPKKKRKV
ABE8e-NRCH dimer editor: NLS, wtTadA, linker, TadA*, SpCas9-NRCH
(SEQ ID NO: 480)
MKRTADGSEFESPKKKRKVSEVEFSHEYWMRHALTLAKRAWDEREVPVGAVLVHNNRVI
GEGWNRPIGRHDPTAHAEIMALRQGGLVMQNYRLIDATLYVTLEPCVMCAGAMIHSRI
GRVVFGARDAKTGAAGSLMDVLHHPGMNHRVEITEGILADECAALLSDFFRMRRQEIK
AQKKAQSSTDSGGSSGGSSGSETPGTSESATPESSGGSSGGSSEVEFSHEYWMRHALTLAKRAR
DEREVPVGAVLVLNNRVIGEGWNRAIGLHDPTAHAEIMALRQGGLVMQNYRLIDATLYVTFEPCVM
CAGAMIHSRIGRWFGVRNSKRGAAGSLMNVLNYPGMNHRVEITEGILADECAALLCDFYRMPRQ
VFNAQKKAQSSINSGGSSGGSSGSETPGTSESATPESSGGSSGGSDKKYSIGLAIGTNSVGWAVITD
EYKVPSKKFKVLGNTDRHSIKKNLIGALLFDSGETAEATRLKRTARRRYTRRKNRICYLQEIFSNEMA
KVDDSFFHRLEESFLVEEDKKHERHPIFGNIVDEVAYHEKYPTIYHLRKKLVDSTDKADLRLIYLALA
HMIKFRGHFLIEGDLNPDNSDVDKLFIQLVQTYNQLFEENPINASGVDAKAILSARLSKSRRLENLIA
QLPGEKKNGLFGNLIALSLGLTPNFKSNFDLAEDAKLQLSKDTYDDDLDNLLAQIGDQYADLFLAA
KNLSDAILLSDILRVNTEITKAPLSASMVKRYDEHHQDLTLLKALVRQQLPEKYKEIFFDQSKNGYA
GYIDGGASQEEFYKFIKPILEKMDGTEELLVKLNREDLLRKQRTFDNGIIPHQIHLGELHAILRRQG
DFYPFLKDNREKIEKILTFRIPYYVGPLARGNSRFAWMTRKSEETITPWNFEEWDKGASAQSFIER
MTNFDKNLPNEKVLPKHSLLYEYFTVYNELTKVKYVTEGMRKPAFLSGEQKKAIVDLLFKTNRKVT
VKQLKEDYFKKIECFDSVEISGVEDRFNASLGTYHDLLKIIKDKDFLDNEENEDILEDIVLTLTLFED
REMIEERLKTYAHLFDDKVMKQLKRLRYTGWGRLSRKLINGIRDKQSGKTILDFLKSDGFANRNFM
QLIHDDSLTFKEDIQKAQVSCQGDSLHEHIANLAGSPAIKKGILQTVKWDELIKVMGGHKPENIVI
EMARENQTTQKGQKNSRERMKRIEEGIKELGSQILKEHPVENTQLQNEKLYLYYLQNGRDMYVDQ
ELDINRLSDYDVDHIVPQSFLKDDSIENKVLTRSDKNRGKSDNVPSEEWKKMKNYWRQLLNAKLI
TQRKFDNLTKAERGGLSELDKAGFIKRQLAETRQITKHVAQILDSRMNTKYDENDKLIREVKVITLK
SKLVSDFRKDFQFYKVREINNYHHAHDAYLNAWGTALIKKYPKLESEFVYGDYKVYDVRKMIAKSE
QEIGKATAKYFFYSNIMNFFKTEITLANGEIRKRPLIETNGETGEIVWDKGRDFATVRKVLSMPQVNI
VKKTEVQTGGFSKESILPKGNSDKLIARKKDWDPKKYGGFNSPTVAYSVLWAKVEKGKSKKLKSV
KELLGITIMERSSFEKNPIDFLEAKGYKEVKKDLIIKLPKYSLFELENGRKRMLASAGVLQKGNELAL
PSKYVNFLYLASHYEKLKGSPEDNEQKQLFVEQHKHYLDEIIEQISEFSKRVILADANLDKVLSAYNK
HRDKPIREQAENIIHLFTLTNLGAPAAFKYFDTTINRKQYNTTKEVLDATLIRQSITGLYETRIDLSQL
GGDSGGSKRTADGSEFEPKKKRKV
ABEZe-NRCH monomer editor: NLS, linker, TadA*, SpCas9-NRCH
(SEQ ID NO: 481)
MKRTADGSEYESPKKKRKVSEVEFSHEYWMRHALTLAKRARDEREVPVGAVLVLNNRVIGEGWN
RAIGLHDPTAHAEIMALRQGGLVMQNYRLIDATLYVTFEPCVMCAGAMIHSRIGRWFGVRNSKRG
AAGSLMNVLNYPGMNHRVEITEGILADECAALLCDFYRMPRQVFNAQKKAQSSINSGGSSGGSSG
SEYPGYSESATPESSGGSSGGSDKKYSIGLAIGTNSVGWAVITDEYKVPSKKFKVLGNTDRHSIKKN
LIGALLFDSGETAEATRLKRTARRRYTRRKNRICYLQEIFSNEMAKVDDSFFHRLEESFLVEEDKKHE
RHPIFGNIVDEVAYHEKYPTIYHLRKKLVDSTDKADLRLIYLALAHMIKFRGHFLIEGDLNPDNSDV
DKLFIQLVQTYNQLFEENPINASGVDAKAILSARLSKSRRLENLIAQLPGEKKNGLFGNLIALSLGLT
PNFKSNFDLAEDAKLQLSKDTYDDDLDNLLAQIGDQYADLFLAAKNLSDAILLSDILRVNTEITKAP
LSASMVKRYDEHHQDLTLLKALVRQQLPEKYKEIFFDQSKNGYAGYIDGGASQEEFYKFIKPILEK
MDGTEELLVKLNREDLLRKQRTFDNGIIPHQIHLGELHAILRRQGDFYPFLKDNREKIEKILTFRIP
YYVGPLARGNSRFAWMTRKSEETITPWNFEEWDKGASAQSFIERMTNFDKNLPNEKVLPKHSLLY
EYFTVYNELTKVKYVTEGMRKPAFLSGEQKKAIVDLLFKTNRKVTVKQLKEDYFKKIECFDSVEISG
VEDRFNASLGTYHDLLKIIKDKDFLDNEENEDILEDIVLTLTLFEDREMIEERLKTYAHLFDDKVMK
QLKRLRYTGWGRLSRKLINGIRDKQSGKTILDFLKSDGFANRNFMQLIHDDSLTFKEDIQKAQVSC
QGDSLHEHIANLAGSPAIKKGILQTVKWDELIKVMGGHKPENIVIEMARENQTTQKGQKNSRERM
KRIEEGIKELGSQILKEHPVENTQLQNEKLYLYYLQNGRDMYVDQELDINRLSDYDVDHIVPQSFLK
DDSIENKVLTRSDKNRGKSDNVPSEEWKKMKNYWRQLLNAKLITQRKFDNLTKAERGGLSELDK
AGFIKRQLAETRQITKHVAQILDSRMNTKYDENDKLIREVKVITLKSKLVSDFRKDFQFYKVREINNY
HHAHDAYLNAWGTALIKKYPKLESEFVYGDYKVYDVRKMIAKSEQEIGKATAKYFFYSNIMNFFKT
EITLANGEIRKRPLIETNGETGEIVWDKGRDFATVRKVLSMPQVNIVKKTEVQTGGFSKESILPKGNS
DKLIARKKDWDPKKYGGFNSPTVAYSVLWAKVEKGKSKKLKSVKELLGITIMERSSFEKNPIDFLE
AKGYKEVKKDLIIKLPKYSLFELENGRKRMLASAGVLQKGNELALPSKYVNFLYLASHYEKLKGSPE
DNEQKQLFVEQHKHYLDEIIEQISEFSKRVILADANLDKVLSAYNKHRDKPIREQAENIIHLFTLTNL
GAPAAFKYFDTTINRKQYNTTKEVLDATLIRQSITGLYETRIDLSQLGGDSGGSKRTADGSEFEPKK
KRKV
ABE8e-NRRHdimer editor: NLS, wtTadA, linker, TadA*, SpCas9-NRRH
(SEQ ID NO: 482)
MKRTADGSEFESPKKKRKVSEVEFSHEYWMRHALTLAKRAWDEREVPVGAVLVHN
NRVIGEGWNRPIGRHDPTAHAEIMALRQGGLVMQNYRLIDATLYVTLEPCVMCAGA
MIHSRIGRVVFGARDAKTGAAGSLMDVLHHPGMNHRVEITEGILADECAALLSDFFR
MRRQEIKAQKKAQSSTDSGGSSGGSSGSETPGTSESATPESSGGSSGGSSEVEFSHEYW
MRHALTLAKRARDEREVPVGAVLVLNNRVIGEGWNRAIGLHDPTAHAEIMALRQGGLVM
QNYRLIDATLYVTFEPCVMCAGAMIHSRIGRWFGVRNSKRGAAGSEMNVLNYPGMNHRV
EITEGILADECAALLCDFYRMPRQVFNAQKKAQSSINSGGSSGGSSGSETPGTSESATPES
SGGSSGGSDKKYSIGLAIGTNSVGWAVITDEYKVPSKKFKVLGNTDRHSIKKNLIGALLFDS
GETAEATRLKRTARRRYTRRKNRICYLQEIFSNEMAKVDDSFFHRLEESFLVEEDKKHERH
PIFGNIVDEVAYHEKYPTIYHLRKKLVDSTDKADLRLIYLALAHMIKFRGHFLIEGDLNPDN
SDVDKLFIQLVQTYNQLFEENPINASGVDAKAILSARLSKSRRLENLIAQLPGEKKNGLFGN
LIALSLGLTPNFKSNFDLAEDAKLQLSKDTYDDDLDNLLAQIGDQYADLFLAAKNLSDAIL
LSDILRVNTEITKAPLSASMVKRYDEHHQDLTLLKALVRQQLPEKYKEIFFDQSKNGYAGYI
DGGASQEEFYKFIKPILEKMDGTEELLVKLNREDLLRKQRTFDNGIIPHQIHLGELHAILR
RQGDFYPFLKDNREKIEKILTFRIPYYVGPLARGNSRFAWMTRKSEETITPWNFEEWDKG
ASAQSFIERMTNFDKNLPNEKVLPKHSLLYEYFTVYNELTKVKYVTEGMRKPAFLSGEQKK
AIVDLLFKTNRKVTVKQLKEDYFKKIECFDSVEISGVEDRFNASLGTYHDLLKIIKDKDFLD
NEENEDILEDIVLTLTLFEDREMIEERLKTYAHLFDDKVMKQLKRLRYTGWGRLSRKLING
IRDKQSGKTILDFLKSDGFANRNFMQLIHDDSLTFKEDIQKAQVSCQGDSLHEHIANLAG
SPAIKKGILQTVKWDELIKVMGGHKPENIVIEMARENQTTQKGQKNSRERMKRIEEGIKE
LGSQILKEHPVENTQLQNEKLYLYYLQNGRDMYVDQELDINRLSDYDVDHIVPQSFLKDD
SIENKVLTRSDKNRGKSDNVPSEEWKKMKNYWRQLLNAKLITQRKFDNLTKAERGGLSE
LDKAGFIKRQLAETRQITKHVAQILDSRMNTKYDENDKLIREVKVITLKSKLVSDFRKDFQ
FYKVREINNYHHAHDAYLNAWGTALIKKYPKLESEFVYGDYKVYDVRKMIAKSEQEIGKA
TAKYFFYSNIMNFFKTEITLANGEIRKRPLIETNGETGEIVWDKGRDFATVRKVLSMPQVNI
VKKTEVQTGGFSKESILPKGNSDKLIARKKDWDPKKYGGFNSPTAAYSVLWAKVEKGKS
KKLKSVKELLGITIMERSSFEKNPIGFLEAKGYKEVKKDLIIKLPKYSLFELENGRKRMLAS
AGVLHKGNELALPSKYVNFLYLASHYEKLKGSPEDNEQKQLFVEQHKHYLDEIIEQISEFS
KRVILADANLDKVLSAYNKHRDKPIREQAENIIHLFTLTNLGVPAAFKYFDTTIDKKRYTST
KEVLDATLIHQSITGLYETRIDLSQLGGDSGGSKRTADGSEFEPKKKRKV
ABESe-NRRH monomer editor: NLS, linker, TadA*, SpCas9-NRRH
(SEQ ID NO: 483)
MKRTADGSEFESPKKKRKVSEVEFSHEYWMRHALTLAKRARDEREVPVGAVLVLN
NRVIGEGWNRAIGLHDPTAHAEIMALRQGGLVMQNYRLIDATLYVTFEPCVMCAGA
MIHSRIGRVVFGVRNSKRGAAGSLMNVLNYPGMNHRVEITEGILADECAALLCDFY
RMPRQVFNAQKKAQSSINSGGSSGGSSGSETPGTSESATPESSGGSSGGSDKKYSIGL
AIGTNSVGWAVITDEYKVPSKKFKVLGNTDRHSIKKNLIGALLFDSGETAEATRLKR
TARRRYTRRKNRICYLQEIFSNEMAKVDDSFFHRLEESFLVEEDKKHERHPIFGNIVD
EVAYHEKYPTIYHLRKKLVDSTDKADLRLIYLALAHMIKFRGHFLIEGDLNPDNSDV
DKLFIQLVQTYNQLFEENPINASGVDAKAILSARLSKSRRLENLIAQLPGEKKNGLFG
NLIALSLGLTPNFKSNFDLAEDAKLQLSKDTYDDDLDNLLAQIGDQYADLFLAAKNL
SDAILLSDILRVNTEITKAPLSASMVKRYDEHHQDLTLLKALVRQQLPEKYKEIFFDQ
SKNGYAGYIDGGASQEEFYKFIKPILEKMDGTEELLVKLNREDLLRKQRTFDNGIIPH
QIHLGELHAILRRQGDFYPFLKDNREKIEKILTFRIPYYVGPLARGNSRFAWMTRKSE
ETITPWNFEEVVDKGASAQSFIERMTNFDKNLPNEKVLPKHSLLYEYFTVYNELTKV
KYVTEGMRKPAFLSGEQKKAIVDLLFKTNRKVTVKQLKEDYFKKIECFDSVEISGVE
DRFNASLGTYHDLLKIIKDKDFLDNEENEDILEDIVLTLTLFEDREMIEERLKTYAHLF
DDKVMKQLKRLRYTGWGRLSRKLINGIRDKQSGKTILDFLKSDGFANRNFMQLIHD
DSLTFKEDIQKAQVSCQGDSLHEHIANLAGSPAIKKGILQTVKVVDELIKVMGGHKP
ENIVIEMARENQTTQKGQKNSRERMKRIEEGIKELGSQILKEHPVENTQLQNEKLYLY
YLQNGRDMYVDQELDINRLSDYDVDHIVPQSFLKDDSIENKVLTRSDKNRGKSDNV
PSEEVVKKMKNYWRQLLNAKLITQRKFDNLTKAERGGLSELDKAGFIKRQLAETRQ
ITKHVAQILDSRMNTKYDENDKLIREVKVITLKSKLVSDFRKDFQFYKVREINNYHH
AHDAYLNAVVGTALIKKYPKLESEFVYGDYKVYDVRKMIAKSEQEIGKATAKYFFY
SNIMNFFKTEITLANGEIRKRPLIETNGETGEIVWDKGRDFATVRKVLSMPQVNIVKK
TEVQTGGFSKESILPKGNSDKLIARKKDWDPKKYGGFNSPTAAYSVLVVAKVEKGK
SKKLKSVKELLGITIMERSSFEKNPIGFLEAKGYKEVKKDLIIKLPKYSLFELENGRKR
MLASAGVLHKGNELALPSKYVNFLYLASHYEKLKGSPEDNEQKQLFVEQHKHYLD
ElIEQISEFSKRVILADANLDKVLSAYNKHRDKPIREQAENIIHLFTLTNLGVPAAFKYF
DTTIDKKRYTSTKEVLDATLIHQSITGLYETRIDLSQLGGDSGGSKRTADGSEFEPKK
KRKV
SaKKH-ABE8e dimer editor: NLS, wtTadA, linker, TadA*, SaKKH
(SEQ ID NO: 484)
MKRTADGSEFESPKKKRKVSEVEFSHEYWMRHALTLAKRAWDEREVPVGAVLVHN
NRVIGEGWNRPIGRHDPTAHAEIMALRQGGLVMQNYRLIDATLYVTLEPCVMCAGA
MIHSRIGRVVFGARDAKTGAAGSLMDVLHHPGMNHRVEITEGILADECAALLSDFFR
MRRQEIKAQKKAQSSTDSGGSSGGSSGSETPGTSESATPESSGGSSGGSSEVEFSHEYW
MRHALTLAKRARDEREVPVGAVLVLNNRVIGEGWNRAIGLHDPTAHAEIMALRQGGLVM
QNYRLIDATLYVTFEPCVMCAGAMIHSRIGRWFGVRNSKRGAAGSEMNVLNYPGMNHRV
EITEGILADECAALLCDFYRMPRQVFNAQKKAQSSINSGGSSGGSSGSETPGTSESATPES
SGGSSGGSGKRNYILGLAIGITSVGYGIIDYETRDVIDAGVRLFKEANVENNEGRRSKRGAR
RLKRRRRHRIQRVKKLLFDYNLLTDHSELSGINPYEARVKGLSQKLSEEEFSAALLHLAKRR
GVHNVNEVEEDTGNELSTKEQISRNSKALEEKYVAELQLERLKKDGEVRGSINRFKTSDYV
KEAKQLLKVQKAYHQLDQSFIDTYIDLLETRRTYYEGPGEGSPFGWKDIKEWYEMEMGH
CTYFPEELRSVKYAYNADLYNALNDLNNLVITRDENEKLEYYEKFQIIENVFKQKKKPTLK
QIAKEILVNEEDIKGYRVTSTGKPEFTNLKVYHDIKDITARKEIIENAELLDQIAKILTIYQSSE
DIQEELTNLNSELTQEEIEQISNLKGYTGTHNLSLKAINLILDELWHTNDNQIAIFNRLKLVP
KKVDLSQQKEIPTTLVDDFILSPWKRSFIQSIKVINAIIKKYGLPNDIIIELAREKNSKDAQK
MINEMQKRNRQTNERIEEIIRTTGKENAKYLIEKIKLHDMQEGKCLYSLEAIPLEDLLNNPF
NYEVDHIIPRSVSFDNSFNNKVLVKQEENSKKGNRTPFQYLSSSDSKISYETFKKHILNLAK
GKGRISKTKKEYLLEERDINRFSVQKDFINRNLVDTRYATRGEMNLLRSYFRVNNLDVKVK
SINGGFTSFLRRKWKFKKERNKGYKHHAEDALIIANADFIFKEWKKLDKAKKVMENQMF
EEKQAESMPEIETEQEYKEIFITPHQIKHIKDFKDYKYSHRVDKKPNRKLINDTLYSTRKDD
KGNTLIVNNLNGLYDKDNDKLKKLINKSPEKLEMYHHDPQTYQKLKLIMEQYGDEKNPL
YKYYEETGNYLTKYSKKDNGPVIKKIKYYGNKLNAHLDITDDYPNSRNKWKLSLKPYRFD
VYLDNGVYKFVTVKNLDVIKKENYYEVNSKCYEEAKKLKKISNQAEFIASFYKNDLIKINGE
LYRVIGVNNDLLNRIEVNMIDITYREYLENMNDKRPPHIIKTIASKTQSIKKYSTDILGNLYEV
KSKKHPQIIKKGSGGSKRTADGSEFEPKKKRKV
SaKKH-ABESe monomer editor: NLS, linker, TadA*, SaKKH
(SEQ ID NO: 485)
MKRTADGSEFESPKKKRKVSEVEFSHEYWMRHALTLAKRARDEREVPVGAVLVLN
NRVIGEGWNRAIGLHDPTAHAEIMALRQGGLVMQNYRLIDATLYVTFEPCVMCAGA
MIHSRIGRVVFGVRNSKRGAAGSLMNVLNYPGMNHRVEITEGILADECAALLCDFY
RMPRQVFNAQKKAQSSINSGGSSGGSSGSETPGTSESATPESSGGSSGGSGKRNYILG
LAIGITSVGYGIIDYETRDVIDAGVRLFKEANVENNEGRRSKRGARRLKRRRRHRIQR
VKKLLFDYNLLTDHSELSGINPYEARVKGLSQKLSEEEFSAALLHLAKRRGVHNVNE
VEEDTGNELSTKEQISRNSKALEEKYVAELQLERLKKDGEVRGSINRFKTSDYVKEA
KQLLKVQKAYHQLDQSFIDTYIDLLETRRTYYEGPGEGSPFGWKDIKEWYEMLMGH
CTYFPEELRSVKYAYNADLYNALNDLNNLVITRDENEKLEYYEKFQIIENVFKQKKK
PTLKQIAKEILVNEEDIKGYRVTSTGKPEFTNLKVYHDIKDITARKEIIENAELLDQIAK
ILTIYQSSEDIQEELTNLNSELTQEEIEQISNLKGYTGTHNLSLKAINLILDELWHTNDN
QIAIFNRLKLVPKKVDLSQQKEIPTTLVDDFILSPVVKRSFIQSIKVINAIIKKYGLPNDII
lELAREKNSKDAQKMINEMQKRNRQTNERIEEIIRTTGKENAKYLIEKIKLHDMQEGK
CLYSLEAIPLEDLLNNPFNYEVDHIIPRSVSFDNSFNNKVLVKQEENSKKGNRTPFQY
LSSSDSKISYETFKKHILNLAKGKGRISKTKKEYLLEERDINRFSVQKDFINRNLVDTR
YATRGLMNLLRSYFRVNNLDVKVKSINGGFTSFLRRKWKFKKERNKGYKHHAEDA
LIIANADFIFKEWKKLDKAKKVMENQMFEEKQAESMPEIETEQEYKEIFITPHQIKHIK
DFKDYKYSHRVDKKPNRKLINDTLYSTRKDDKGNTLIVNNLNGLYDKDNDKLKKLI
NKSPEKLLMYHHDPQTYQKLKLIMEQYGDEKNPLYKYYEETGNYLTKYSKKDNGP
VIKKIKYYGNKLNAHLDITDDYPNSRNKVVKLSLKPYRFDVYLDNGVYKFVTVKNL
DVIKKENYYEVNSKCYEEAKKLKKISNQAEFIASFYKNDLIKINGELYRVIGVNNDLL
NRIEVNMIDITYREYLENMNDKRPPHIIKTIASKTQSIKKYSTDILGNLYEVKSKKHPQ
IIKKGSGGSKRTADGSEFEPKKKRKV
ABESe-NG dimer editor: NLS, wtTadA, linker, TadA*, SpCas9-NG
(SEQ ID NO: 213)
MKRTADGSEFESPKKKRKVSEVEFSHEYWMRHALTLAKRAWDEREVPVGAVLVHNNRVI
GEGWNRPIGRHDPTAHAEIMALRQGGLVMQNYRLIDATLYVTLEPCVMCAGAMIHSRI
GRVVFGARDAKTGAAGSLMDVLHHPGMNHRVEITEGILADECAALLSDFFRMRRQEIK
AQKKAQSSTDSGGSSGGSSGSETPGTSESATPESSGGSSGGSSEVEFSHEYWMRHALTLAKRAR
DEREVPVGAVLVLNNRVIGEGWNRAIGLHDPTAHAEIMALRQGGLVMQNYRLIDATLYVTFEPCVM
CAGAMIHSRIGRWFGVRNSKRGAAGSLMNVLNYPGMNHRVEITEGILADECAALLCDFYRMPRQ
VFNAQKKAQSSINSGGSSGGSSGSETPGTSESATPESSGGSSGGSDKKYSIGLAIGTNSVGWAVITD
EYKVPSKKFKVLGNTDRHSIKKNLIGALLFDSGETAEATRLKRTARRRYTRRKNRICYLQEIFSNEMA
KVDDSFFHRLEESFLVEEDKKHERHPIFGNIVDEVAYHEKYPTIYHLRKKLVDSTDKADLRLIYLALA
HMIKFRGHFLIEGDLNPDNSDVDKLFIQLVQTYNQLFEENPINASGVDAKAILSARLSKSRRLENLIA
QLPGEKKNGLFGNLIALSLGLTPNFKSNFDLAEDAKLQLSKDTYDDDLDNLLAQIGDQYADLFLAA
KNLSDAILLSDILRVNTEITKAPLSASMIKRYDEHHQDLTLLKALVRQQLPEKYKEIFFDQSKNGYAG
YIDGGASQEEFYKFIKPILEKMDGTEELLVKLNREDLLRKQRTFDNGSIPHQIHLGELHAILRRQED
FYPFLKDNREKIEKILTFRIPYYVGPLARGNSRFAWMTRKSEETITPWNFEEWDKGASAQSFIERMT
NFDKNLPNEKVLPKHSLLYEYFTVYNELTKVKYVTEGMRKPAFLSGEQKKAIVDLLFKTNRKVTVK
QLKEDYFKKIECFDSVEISGVEDRFNASLGTYHDLLKIIKDKDFLDNEENEDILEDIVLTLTLFEDRE
MIEERLKTYAHLFDDKVMKQLKRRRYTGWGRLSRKLINGIRDKQSGKTILDFLKSDGFANRNFMQL
IHDDSLTFKEDIQKAQVSGQGDSLHEHIANLAGSPAIKKGILQTVKWDELVKVMGRHKPENIVIEM
ARENQTTQKGQKNSRERMKRIEEGIKELGSQILKEHPVENTQLQNEKLYLYYLQNGRDMYVDQEL
DINRLSDYDVDHIVPQSFLKDDSIDNKVLTRSDKNRGKSDNVPSEEWKKMKNYWRQLLNAKLITQ
RKFDNLTKAERGGLSELDKAGFIKRQLVETRQITKHVAQILDSRMNTKYDENDKLIREVKVITLKSK
LVSDFRKDFQFYKVREINNYHHAHDAYLNAWGTALIKKYPKLESEFVYGDYKVYDVRKMIAKSEQ
EIGKATAKYFFYSNIMNFFKTEITLANGEIRKRPLIETNGETGEIVWDKGRDFATVRKVLSMPQVNIV
KKTEVQTGGFSKESIRPKRNSDKLIARKKDWDPKKYGGFVSPTVAYSVLWAKVEKGKSKKLKSVK
ELLGITIMERSSFEKNPIDFLEAKGYKEVKKDLIIKLPKYSLFELENGRKRMLASARFLQKGNELALP
SKYVNFLYLASHYEKLKGSPEDNEQKQLFVEQHKHYLDEIIEQISEFSKRVILADANLDKVLSAYNK
HRDKPIREQAENIIHLFTLTNLGAPRAFKYFDTTIDRKVYRSTKEVLDATLIHQSITGLYETRIDLSQL
GGDSGGSKRTADGSEFEPKKKRKV
ABEZe-NG monomer editor: NLS, linker, TadA*, SpCas9-NG (“NG-ABEZe”)
(SEQ ID NO: 212)
MKRTADGSEYESPKKKRKVSEVEFSHEYWMRHALTLAKRARDEREVPVGAVLVLNNRVIGEGWN
RAIGLHDPTAHAEIMALRQGGLVMQNYRLIDATLYVTFEPCVMCAGAMIHSRIGRWFGVRNSKRG
AAGSLMNVLNYPGMNHRVEITEGILADECAALLCDFYRMPRQVFNAQKKAQSSINSGGSSGGSSG
SETPGSESATPESSGGSSGGSDKKYSIGLAIGTNSVGWAVITDEYKVPSKKFKVLGNTDRHSIKKN
LIGALLFDSGETAEATRLKRTARRRYTRRKNRICYLQEIFSNEMAKVDDSFFHRLEESFLVEEDKKHE
RHPIFGNIVDEVAYHEKYPTIYHLRKKLVDSTDKADLRLIYLALAHMIKFRGHFLIEGDLNPDNSDV
DKLFIQLVQTYNQLFEENPINASGVDAKAILSARLSKSRRLENLIAQLPGEKKNGLFGNLIALSLGLT
PNFKSNFDLAEDAKLQLSKDTYDDDLDNLLAQIGDQYADLFLAAKNLSDAILLSDILRVNTEITKAP
LSASMIKRYDEHHQDLTLLKALVRQQLPEKYKEIFFDQSKNGYAGYIDGGASQEEFYKFIKPILEKM
DGTEELLVKLNREDLLRKQRTFDNGSIPHQIHLGELHAILRRQEDFYPFLKDNREKIEKILTFRIPYY
VGPLARGNSRFAWMTRKSEETITPWNFEEWDKGASAQSFIERMTNFDKNLPNEKVLPKHSLLYEY
FTVYNELTKVKYVTEGMRKPAFLSGEQKKAIVDLLFKTNRKVTVKQLKEDYFKKIECFDSVEISGVE
DRFNASLGTYHDLLKIIKDKDFLDNEENEDILEDIVLTLTLFEDREMIEERLKTYAHLFDDKVMKQL
KRRRYTGWGRLSRKLINGIRDKQSGKTILDFLKSDGFANRNFMQLIHDDSLTFKEDIQKAQVSGQG
DSLHEHIANLAGSPAIKKGILQTVKWDELVKVMGRHKPENIVIEMARENQTTQKGQKNSRERMKR
IEEGIKELGSQILKEHPVENTQLQNEKLYLYYLQNGRDMYVDQELDINRLSDYDVDHIVPQSFLKD
DSIDNKVLTRSDKNRGKSDNVPSEEWKKMKNYWRQLLNAKLITQRKFDNLTKAERGGLSELDKA
GFIKRQLVETRQITKHVAQILDSRMNTKYDENDKLIREVKVITLKSKLVSDFRKDFQFYKVREINNYH
HAHDAYLNAWGTALIKKYPKLESEFVYGDYKVYDVRKMIAKSEQEIGKATAKYFFYSNIMNFFKTEI
TLANGEIRKRPLIETNGETGEIVWDKGRDFATVRKVLSMPQVNIVKKTEVQTGGFSKESIRPKRNSD
KLIARKKDWDPKKYGGFVSPTVAYSVLWAKVEKGKSKKLKSVKELLGITIMERSSFEKNPIDFLEA
KGYKEVKKDLIIKLPKYSLFELENGRKRMLASARFLQKGNELALPSKYVNFLYLASHYEKLKGSPED
NEQKQLFVEQHKHYLDEIIEQISEFSKRVILADANLDKVLSAYNKHRDKPIREQAENIIHLFTLTNLG
APRAFKYFDTTIDRKVYRSTKEVLDATLIHQSITGLYETRIDLSQLGGDSGGSKRTADGSEFEPKKK
RKV
ABE8e-CP1041 dimer editor: NLS, wtTadA, linker, TadA*, CP1041
(SEQ ID NO: 486)
MKRTADGSEFESPKKKRKVSEVEFSHEYWMRHALTLAKRAWDEREVPVGAVLVHN
NRVIGEGWNRPIGRHDPTAHAEIMALRQGGLVMQNYRLIDATLYVTLEPCVMCAGA
MIHSRIGRVVFGARDAKTGAAGSLMDVLHHPGMNHRVEITEGILADECAALLSDFFR
MRRQEIKAQKKAQSSTDSGGSSGGSSGSETPGTSESATPESSGGSSGGSSEVEFSHEYW
MRHALTLAKRARDEREVPVGAVLVLNNRVIGEGWNRAIGLHDPTAHAEIMALRQGGLVM
QNYRLIDATLYVTFEPCVMCAGAMIHSRIGRWFGVRNSKRGAAGSEMNVLNYPGMNHRV
EITEGILADECAALLCDFYRMPRQVFNAQKKAQSSINSGGSSGGSSGETPGTSESATPES
SGGSSGGSNIMNFFKTEITLANGEIRKRPLIETNGETGEIVWDKGRDFATVRKVLSMPQVN
IVKKTEVQTGGFSKESILPKRNSDKLIARKKDWDPKKYGGFDSPTVAYSVLWAKVEKGKS
KKLKSVKELLGITIMERSSFEKNPIDFLEAKGYKEVKKDLIIKLPKYSLFELENGRKRMLAS
AGELQKGNELALPSKYVNFLYLASHYEKLKGSPEDNEQKQLFVEQHKHYLDEIIEQISEFS
KRVILADANLDKVLSAYNKHRDKPIREQAENIIHLFTLTNLGAPAAFKYFDTTIDRKRYTST
KEVLDATLIHQSITGLYETRIDLSQLGGDGGSGGSGGSGGSGGSGGSGGDKKYSIGLAIGT
NSVGWAVITDEYKVPSKKFKVLGNTDRHSIKKNLIGALLFDSGETAEATRLKRTARRRYTRR
KNRICYLQEIFSNEMAKVDDSFFHRLEESFLVEEDKKHERHPIFGNIVDEVAYHEKYPTIY
HLRKKLVDSTDKADLRLIYLALAHMIKFRGHFLIEGDLNPDNSDVDKLFIQLVQTYNQLFE
ENPINASGVDAKAILSARLSKSRRLENLIAQLPGEKKNGLFGNLIALSLGLTPNFKSNFDLA
EDAKLQLSKDTYDDDLDNLLAQIGDQYADLFLAAKNLSDAILLSDILRVNTEITKAPLSASM
IKRYDEHHQDLTLLKALVRQQLPEKYKEIFFDQSKNGYAGYIDGGASQEEFYKFIKPILEK
MDGTEELLVKLNREDLLRKQRTFDNGSIPHQIHLGELHAILRRQEDFYPFLKDNREKIEKI
LTFRIPYYVGPLARGNSRFAWMTRKSEETITPWNFEEWDKGASAQSFIERMTNFDKNLPN
EKVLPKHSLLYEYFTVYNELTKVKYVTEGMRKPAFLSGEQKKAIVDLLFKTNRKVTVKQLK
EDYFKKIECFDSVEISGVEDRFNASLGTYHDLLKIIKDKDFLDNEENEDILEDIVLTLTLFE
DREMIEERLKTYAHLFDDKVMKQLKRRRYTGWGRLSRKLINGIRDKQSGKTILDFLKSDG
FANRNFMQLIHDDSLTFKEDIQKAQVSGQGDSLHEHIANLAGSPAIKKGILQTVKWDELV
KVMGRHKPENIVIEMARENQTTQKGQKNSRERMKRIEEGIKELGSQILKEHPVENTQLQN
EKLYLYYLQNGRDMYVDQELDINRLSDYDVDHIVPQSFLKDDSIDNKVLTRSDKNRGKSD
NVPSEEWKKMKNYWRQLLNAKLITQRKFDNLTKAERGGLSELDKAGFIKRQLVETRQIT
KHVAQILDSRMNTKYDENDKLIREVKVITLKSKLVSDFRKDFQFYKVREINNYHHAHDAYL
NAVVGTALIKKYPKLESEFVYGDYKVYDVRKMIAKSEQEIGKATAKYFFYSSGGSKRANDG
SEFEPKKKRKV
ABE8e-CP1041 monomer editor: NLS, linker, TadA*, CP1041
(SEQ ID NO: 218)
MKRTADGSEFESPKKKRKVSEVEFSHEYWMRHALTLAKRARDEREVPVGAVLVLN
NRVIGEGWNRAIGLHDPTAHAEIMALRQGGLVMQNYRLIDATLYVTFEPCVMCAGA
MIHSRIGRVVFGVRNSKRGAAGSLMNVLNYPGMNHRVEITEGILADECAALLCDFY
RMPRQVFNAQKKAQSSINSGGSSGGSSGSETPGTSESATPESSGGSSGGSNIMNFFKT
EITLANGEIRKRPLIETNGETGEIVWDKGRDFATVRKVLSMPQVNIVKKTEVQTGGFS
KESILPKRNSDKLIARKKDWDPKKYGGFDSPTVAYSVLVVAKVEKGKSKKLKSVKE
LLGITIMERSSFEKNPIDFLEAKGYKEVKKDLIIKLPKYSLFELENGRKRMLASAGELQ
KGNELALPSKYVNFLYLASHYEKLKGSPEDNEQKQLFVEQHKHYLDEIIEQISEFSKR
VILADANLDKVLSAYNKHRDKPIREQAENIIHLFTLTNLGAPAAFKYFDTTIDRKRYT
STKEVLDATLIHQSITGLYETRIDLSQLGGDGGSGGSGGSGGSGGSGGSGGDKKYSIG
LAIGTNSVGWAVITDEYKVPSKKFKVLGNTDRHSIKKNLIGALLFDSGETAEATRLK
RTARRRYTRRKNRICYLQEIFSNEMAKVDDSFFHRLEESFLVEEDKKHERHPIFGNIV
DEVAYHEKYPTIYHLRKKLVDSTDKADLRLIYLALAHMIKFRGHFLIEGDLNPDNSD
VDKLFIQLVQTYNQLFEENPINASGVDAKAILSARLSKSRRLENLIAQLPGEKKNGLF
GNLIALSLGLTPNFKSNFDLAEDAKLQLSKDTYDDDLDNLLAQIGDQYADLFLAAKN
LSDAILLSDILRVNTEITKAPLSASMIKRYDEHHQDLTLLKALVRQQLPEKYKEIFFDQ
SKNGYAGYIDGGASQEEFYKFIKPILEKMDGTEELLVKLNREDLLRKQRTFDNGSIPH
QIHLGELHAILRRQEDFYPFLKDNREKIEKILTFRIPYYVGPLARGNSRFAWMTRKSE
ETITPWNFEEVVDKGASAQSFIERMTNFDKNLPNEKVLPKHSLLYEYFTVYNELTKV
KYVTEGMRKPAFLSGEQKKAIVDLLFKTNRKVTVKQLKEDYFKKIECFDSVEISGVE
DRFNASLGTYHDLLKIIKDKDFLDNEENEDILEDIVLTLTLFEDREMIEERLKTYAHLF
DDKVMKQLKRRRYTGWGRLSRKLINGIRDKQSGKTILDFLKSDGFANRNFMQLIHD
DSLTFKEDIQKAQVSGQGDSLHEHIANLAGSPAIKKGILQTVKVVDELVKVMGRHKP
ENIVIEMARENQTTQKGQKNSRERMKRIEEGIKELGSQILKEHPVENTQLQNEKLYLY
YLQNGRDMYVDQELDINRLSDYDVDHIVPQSFLKDDSIDNKVLTRSDKNRGKSDNV
PSEEVVKKMKNYWRQLLNAKLITQRKFDNLTKAERGGLSELDKAGFIKRQLVETRQ
ITKHVAQILDSRMNTKYDENDKLIREVKVITLKSKLVSDFRKDFQFYKVREINNYHH
AHDAYLNAVVGTALIKKYPKLESEFVYGDYKVYDVRKMIAKSEQEIGKATAKYFFY
SSGGSKRTADGSEFEPKKKRKV
ABE8e-CP1028 dimer editor: NLS, wtTadA, linker, TadA*, CP1028
(SEQ ID NO: 217)
MKRTADGSEFESPKKKRKVSEVEFSHEYWMRHALTLAKRAWDEREVPVGAVLVHNNRVI
GEGWNRPIGRHDPTAHAEIMALRQGGLVMQNYRLIDATLYVTLEPCVMCAGAMIHSRI
GRVVFGARDAKTGAAGSLMDVLHHPGMNHRVEITEGILADECAALLSDFFRMRRQEIK
AQKKAQSSTDSGGSSGGSSGSETPGTSESATPESSGGSSGGSSEVEFSHEYWMRHALTLAKRAR
DEREVPVGAVLVLNNRVIGEGWNRAIGLHDPTAHAEIMALRQGGLVMQNYRLIDATLYVTFEPCVM
CAGAMIHSRIGRWFGVRNSKRGAAGSLMNVLNYPGMNHRVEITEGILADECAALLCDFYRMPRQ
VFNAQKKAQSSINSGGSSGGSSGSEYYGYSESKVYESSGGSSGGSEIGKATAKYFFYSNIMNFFKTE
ITLANGEIRKRPLIETNGETGEIVWDKGRDFATVRKVLSMPQVNIVKKTEVQTGGFSKESILPKRNSD
KLIARKKDWDPKKYGGFDSPTVAYSVLWAKVEKGKSKKLKSVKELLGITIMERSSFEKNPIDFLEA
KGYKEVKKDLIIKLPKYSLFELENGRKRMLASAGELQKGNELALPSKYVNFLYLASHYEKLKGSPED
NEQKQLFVEQHKHYLDEIIEQISEFSKRVILADANLDKVLSAYNKHRDKPIREQAENIIHLFTLTNLG
APAAFKYFDTTIDRKRYTSTKEVLDATLIHQSITGLYETRIDLSQLGGDGGSGGSGGSGGSGGSGGS
GGMDKKYSIGLAIGTNSVGWAVITDEYKVPSKKFKVLGNTDRHSIKKNLIGALLFDSGETAEATRLK
RTARRRYTRRKNRICYLQEIFSNEMAKVDDSFFHRLEESFLVEEDKKHERHPIFGNIVDEVAYHEKY
PTIYHLRKKLVDSTDKADLRLIYLALAHMIKFRGHFLIEGDLNPDNSDVDKLFIQLVQTYNQLFEEN
PINASGVDAKAILSARLSKSRRLENLIAQLPGEKKNGLFGNLIALSLGLTPNFKSNFDLAEDAKLQLS
KDTYDDDLDNLLAQIGDQYADLFLAAKNLSDAILLSDILRVNTEITKAPLSASMIKRYDEHHQDLTLL
KALVRQQLPEKYKEIFFDQSKNGYAGYIDGGASQEEFYKFIKPILEKMDGTEELLVKLNREDLLRK
QRTFDNGSIPHQIHLGELHAILRRQEDFYPFLKDNREKIEKILTFRIPYYVGPLARGNSRFAWMTRKS
EETITPWNFEEWDKGASAQSFIERMTNFDKNLPNEKVLPKHSLLYEYFTVYNELTKVKYVTEGMR
KPAFLSGEQKKAIVDLLFKTNRKVTVKQLKEDYFKKIECFDSVEISGVEDRFNASLGTYHDLLKIIK
DKDFLDNEENEDILEDIVLTLTLFEDREMIEERLKTYAHLFDDKVMKQLKRRRYTGWGRLSRKLIN
GIRDKQSGKTILDFLKSDGFANRNFMQLIHDDSLTFKEDIQKAQVSGQGDSLHEHIANLAGSPAIKK
GILQTVKWDELVKVMGRHKPENIVIEMARENQTTQKGQKNSRERMKRIEEGIKELGSQILKEHPV
ENTQLQNEKLYLYYLQNGRDMYVDQELDINRLSDYDVDHIVPQSFLKDDSIDNKVLTRSDKNRGKS
DNVPSEEWKKMKNYWRQLLNAKLITQRKFDNLTKAERGGLSELDKAGFIKRQLVETRQITKHVAQ
ILDSRMNTKYDENDKLIREVKVITLKSKLVSDFRKDFQFYKVREINNYHHAHDAYLNAWGTALIKK
YPKLESEFVYGDYKVYDVRKMIAKSEQSGGSKRTADGSEFEPKKKRKV
ABE8e-CP1028 monomer editor: NLS, linker, TadA*, CP1028
(SEQ ID NO: 216)
MKRTADGSEFESPKKKRKVSEVEFSHEYWMRHALTLAKRARDEREVPVGAVLVLNNRVIGEGWN
RAIGLHDPTAHAEIMALRQGGLVMQNYRLIDATLYVTFEPCVMCAGAMIHSRIGRWFGVRNSKRG
AAGSLMNVLNYPGMNHRVEITEGILADECAALLCDFYRMPRQVFNAQKKAQSSINSGGSSGGSSG
SETPGTSESATPESSGGSSGGSEIGKATAKYFFYSNIMNFFKTEITLANGEIRKRPLIETNGETGEIV
WDKGRDFATVRKVLSMPQVNIVKKTEVQTGGFSKESILPKRNSDKLIARKKDWDPKKYGGFDSPT
VAYSVLWAKVEKGKSKKLKSVKELLGITIMERSSFEKNPIDFLEAKGYKEVKKDLIIKLPKYSLFELE
NGRKRMLASAGELQKGNELALPSKYVNFLYLASHYEKLKGSPEDNEQKQLFVEQHKHYLDEIIEQI
SEFSKRVILADANLDKVLSAYNKHRDKPIREQAENIIHLFTLTNLGAPAAFKYFDTTIDRKRYTSTKEV
LDATLIHQSITGLYETRIDLSQLGGDGGSGGSGGSGGSGGSGGSGGMDKKYSIGLAIGTNSVGWAVI
TDEYKVPSKKFKVLGNTDRHSIKKNLIGALLFDSGETAEATRLKRTARRRYTRRKNRICYLQEIFSNE
MAKVDDSFFHRLEESFLVEEDKKHERHPIFGNIVDEVAYHEKYPTIYHLRKKLVDSTDKADLRLIYL
ALAHMIKFRGHFLIEGDLNPDNSDVDKLFIQLVQTYNQLFEENPINASGVDAKAILSARLSKSRRLE
NLIAQLPGEKKNGLFGNLIALSLGLTPNFKSNFDLAEDAKLQLSKDTYDDDLDNLLAQIGDQYADL
FLAAKNLSDAILLSDILRVNTEITKAPLSASMIKRYDEHHQDLTLLKALVRQQLPEKYKEIFFDQSKN
GYAGYIDGGASQEEFYKFIKPILEKMDGTEELLVKLNREDLLRKQRTFDNGSIPHQIHLGELHAILR
RQEDFYPFLKDNREKIEKILTFRIPYYVGPLARGNSRFAWMTRKSEETITPWNFEEWDKGASAQSFI
ERMTNFDKNLPNEKVLPKHSLLYEYFTVYNELTKVKYVTEGMRKPAFLSGEQKKAIVDLLFKTNRK
VTVKQLKEDYFKKIECFDSVEISGVEDRFNASLGTYHDLLKIIKDKDFLDNEENEDILEDIVLTLTLF
EDREMIEERLKTYAHLFDDKVMKQLKRRRYTGWGRLSRKLINGIRDKQSGKTILDFLKSDGFANRN
FMQLIHDDSLTFKEDIQKAQVSGQGDSLHEHIANLAGSPAIKKGILQTVKWDELVKVMGRHKPEN
IVIEMARENQTTQKGQKNSRERMKRIEEGIKELGSQILKEHPVENTQLQNEKLYLYYLQNGRDMYV
DQELDINRLSDYDVDHIVPQSFLKDDSIDNKVLTRSDKNRGKSDNVPSEEWKKMKNYWRQLLNA
KLITQRKFDNLTKAERGGLSELDKAGFIKRQLVETRQITKHVAQILDSRMNTKYDENDKLIREVKVI
TLKSKLVSDFRKDFQFYKVREINNYHHAHDAYLNAWGTALIKKYPKLESEFVYGDYKVYDVRKMIA
KSEQSGGSKRTADGSEFEPKKKRKV
ABE8e-VRQR dimer editor: NLS, wtTadA, linker, TadA*, SpCas9-VRQR
(SEQ ID NO: 487)
MKRTADGSEFESPKKKRKVSEVEFSHEYWMRHALTLAKRAWDEREVPVGAVLVHN
NRVIGEGWNRPIGRHDPTAHAEIMALRQGGLVMQNYRLIDATLYVTLEPCVMCAGA
MIHSRIGRVVFGARDAKTGAAGSLMDVLHHPGMNHRVEITEGILADECAALLSDFFR
MRRQEIKAQKKAQSSTDSGGSSGGSSGSETPGTSESATPESSGGSSGGSSEVEFSHEYW
MRHALTLAKRARDEREVPVGAVLVLNNRVIGEGWNRAIGLHDPTAHAEIMALRQGGLVM
QNYRLIDATLYVTFEPCVMCAGAMIHSRIGRWFGVRNSKRGAAGSEMNVLNYPGMNHRV
EITEGILADECAALLCDFYRMPRQVFNAQKKAQSSINSGGSSGGSSGSETPGTSESATPES
SGGSSGGSDKKYSIGLAIGTNSVGWAVITDEYKVPSKKFKVLGNTDRHSIKKNLIGALLFDS
GETAEATRLKRTARRRYTRRKNRICYLQEIFSNEMAKVDDSFFHRLEESFLVEEDKKHERH
PIFGNIVDEVAYHEKYPTIYHLRKKLVDSTDKADLRLIYLALAHMIKFRGHFLIEGDLNPDN
SDVDKLFIQLVQTYNQLFEENPINASGVDAKAILSARLSKSRRLENLIAQLPGEKKNGLFGN
LIALSLGLTPNFKSNFDLAEDAKLQLSKDTYDDDLDNLLAQIGDQYADLFLAAKNLSDAIL
LSDILRVNTEITKAPLSASMIKRYDEHHQDLTLLKALVRQQLPEKYKEIFFDQSKNGYAGYI
DGGASQEEFYKFIKPILEKMDGTEELLVKLNREDLLRKQRTFDNGSIPHQIHLGELHAILR
RQEDFYPFLKDNREKIEKILTFRIPYYVGPLARGNSRFAWMTRKSEETITPWNFEEWDKG
ASAQSFIERMTNFDKNLPNEKVLPKHSLLYEYFTVYNELTKVKYVTEGMRKPAFLSGEQKK
AIVDLLFKTNRKVTVKQLKEDYFKKIECFDSVEISGVEDRFNASLGTYHDLLKIIKDKDFLD
NEENEDILEDIVLTLTLFEDREMIEERLKTYAHLFDDKVMKQLKRRRYTGWGRLSRKLING
IRDKQSGKTILDFLKSDGFANRNFMQLIHDDSLTFKEDIQKAQVSGQGDSLHEHIANLAG
SPAIKKGILQTVKWDELVKVMGRHKPENIVIEMARENQTTQKGQKNSRERMKRIEEGIKE
LGSQILKEHPVENTQLQNEKLYLYYLQNGRDMYVDQELDINRLSDYDVDHIVPQSFLKDD
SIDNKVLTRSDKNRGKSDNVPSEEWKKMKNYWRQLLNAKLITQRKFDNLTKAERGGLSE
LDKAGFIKRQLVETRQITKHVAQILDSRMNTKYDENDKLIREVKVITLKSKLVSDFRKDFQ
FYKVREINNYHHAHDAYLNAWGTALIKKYPKLESEFVYGDYKVYDVRKMIAKSEQEIGKA
TAKYFFYSNIMNFFKTEITLANGEIRKRPLIETNGETGEIVWDKGRDFATVRKVLSMPQVNI
VKKTEVQTGGFSKESILPKRNSDKLIARKKDWDPKKYGGFVSPTVAYSVLWAKVEKGKS
KKLKSVKELLGITIMERSSFEKNPIDFLEAKGYKEVKKDLIIKLPKYSLFELENGRKRMLAS
ARELQKGNELALPSKYVNFLYLASHYEKLKGSPEDNEQKQLFVEQHKHYLDEIIEQISEFS
KRVILADANLDKVLSAYNKHRDKPIREQAENIIHLFTLTNLGAPAAFKYFDTTIDRKQYRST
KEVLDATLIHQSITGLYETRIDLSQLGGDSGGSKRTADGSEFEPKKKRKV
ABE8e-VRQR monomer editor: NLS, linker, TadA*, SpCas9-VRQR
(SEQ ID NO: 488)
MKRTADGSEFESPKKKRKVSEVEFSHEYWMRHALTLAKRARDEREVPVGAVLVLN
NRVIGEGWNRAIGLHDPTAHAEIMALRQGGLVMQNYRLIDATLYVTFEPCVMCAGA
MIHSRIGRVVFGVRNSKRGAAGSLMNVLNYPGMNHRVEITEGILADECAALLCDFY
RMPRQVFNAQKKAQSSINSGGSSGGSSGSETPGTSESATPESSGGSSGGSDKKYSIGL
AIGTNSVGWAVITDEYKVPSKKFKVLGNTDRHSIKKNLIGALLFDSGETAEATRLKR
TARRRYTRRKNRICYLQEIFSNEMAKVDDSFFHRLEESFLVEEDKKHERHPIFGNIVD
EVAYHEKYPTIYHLRKKLVDSTDKADLRLIYLALAHMIKFRGHFLIEGDLNPDNSDV
DKLFIQLVQTYNQLFEENPINASGVDAKAILSARLSKSRRLENLIAQLPGEKKNGLFG
NLIALSLGLTPNFKSNFDLAEDAKLQLSKDTYDDDLDNLLAQIGDQYADLFLAAKNL
SDAILLSDILRVNTEITKAPLSASMIKRYDEHHQDLTLLKALVRQQLPEKYKEIFFDQS
KNGYAGYIDGGASQEEFYKFIKPILEKMDGTEELLVKLNREDLLRKQRTFDNGSIPH
QIHLGELHAILRRQEDFYPFLKDNREKIEKILTFRIPYYVGPLARGNSRFAWMTRKSE
ETITPWNFEEVVDKGASAQSFIERMTNFDKNLPNEKVLPKHSLLYEYFTVYNELTKV
KYVTEGMRKPAFLSGEQKKAIVDLLFKTNRKVTVKQLKEDYFKKIECFDSVEISGVE
DRFNASLGTYHDLLKIIKDKDFLDNEENEDILEDIVLTLTLFEDREMIEERLKTYAHLF
DDKVMKQLKRRRYTGWGRLSRKLINGIRDKQSGKTILDFLKSDGFANRNFMQLIHD
DSLTFKEDIQKAQVSGQGDSLHEHIANLAGSPAIKKGILQTVKVVDELVKVMGRHKP
ENIVIEMARENQTTQKGQKNSRERMKRIEEGIKELGSQILKEHPVENTQLQNEKLYLY
YLQNGRDMYVDQELDINRLSDYDVDHIVPQSFLKDDSIDNKVLTRSDKNRGKSDNV
PSEEVVKKMKNYWRQLLNAKLITQRKFDNLTKAERGGLSELDKAGFIKRQLVETRQ
ITKHVAQILDSRMNTKYDENDKLIREVKVITLKSKLVSDFRKDFQFYKVREINNYHH
AHDAYLNAVVGTALIKKYPKLESEFVYGDYKVYDVRKMIAKSEQEIGKATAKYFFY
SNIMNFFKTEITLANGEIRKRPLIETNGETGEIVWDKGRDFATVRKVLSMPQVNIVKK
TEVQTGGFSKESILPKRNSDKLIARKKDWDPKKYGGFVSPTVAYSVLVVAKVEKGK
SKKLKSVKELLGITIMERSSFEKNPIDFLEAKGYKEVKKDLIIKLPKYSLFELENGRKR
MLASARELQKGNELALPSKYVNFLYLASHYEKLKGSPEDNEQKQLFVEQHKHYLDE
HIEQISEFSKRVILADANLDKVLSAYNKHRDKPIREQAENIIHLFTLTNLGAPAAFKYF
DTTIDRKQYRSTKEVLDATLIHQSITGLYETRIDLSQLGGDSGGSKRTADGSEFEPKK
KRKV
ABE8e-NG-CP1041 dimer editor: NLS, wtTadA, linker, TadA*,
SpCas9-NG-CP1041
(SEQ ID NO: 478)
MKRTADGSEFESPKKKRKVSEVEFSHEYWMRHALTLAKRAWDEREVPVGAVLVHNNRVI
GEGWNRPIGRHDPTAHAEIMALRQGGLVMQNYRLIDATLYVTLEPCVMCAGAMIHSRI
GRVVFGARDAKTGAAGSLMDVLHHPGMNHRVEITEGILADECAALLSDFFRMRRQEIK
AQKKAQSSTDSGGSSGGSSGSETPGTSESATPESSGGSSGGSSEVEFSHEYWMRHALTLAKRAR
DEREVPVGAVLVLNNRVIGEGWNRAIGLHDPTAHAEIMALRQGGLVMQNYRLIDATLYVTFEPCVM
CAGAMIHSRIGRWFGVRNSKRGAAGSLMNVLNYPGMNHRVEITEGILADECAALLCDFYRMPRQ
VFNAQKKAQSSINSGGSSGGSSGSEYYGYSESKVYESSGGSSGGSNIMNFFKTEITLANGEIRKRPL
IETNGETGEIVWDKGRDFATVRKVLSMPQVNIVKKTEVQTGGFSKESIRPKRNSDKLIARKKDWDP
KKYGGFVSPTVAYSVLWAKVEKGKSKKLKSVKELLGITIMERSSFEKNPIDFLEAKGYKEVKKDLII
KLPKYSLFELENGRKRMLASARFLQKGNELALPSKYVNFLYLASHYEKLKGSPEDNEQKQLFVEQH
KHYLDEIIEQISEFSKRVILADANLDKVLSAYNKHRDKPIREQAENIIHLFTLTNLGAPRAFKYFDTTI
DRKVYRSTKEVLDATLIHQSITGLYETRIDLSQLGGDGGSGGSGGSGGSGGSGGSGGDKKYSIGLAI
GTNSVGWAVITDEYKVPSKKFKVLGNTDRHSIKKNLIGALLFDSGETAEATRLKRTARRRYTRRKNRI
CYLQEIFSNEMAKVDDSFFHRLEESFLVEEDKKHERHPIFGNIVDEVAYHEKYPTIYHLRKKLVDST
DKADLRLIYLALAHMIKFRGHFLIEGDLNPDNSDVDKLFIQLVQTYNQLFEENPINASGVDAKAILS
ARLSKSRRLENLIAQLPGEKKNGLFGNLIALSLGLTPNFKSNFDLAEDAKLQLSKDTYDDDLDNLLA
QIGDQYADLFLAAKNLSDAILLSDILRVNTEITKAPLSASMIKRYDEHHQDLTLLKALVRQQLPEKYK
EIFFDQSKNGYAGYIDGGASQEEFYKFIKPILEKMDGTEELLVKLNREDLLRKQRTFDNGSIPHQIH
LGELHAILRRQEDFYPFLKDNREKIEKILTFRIPYYVGPLARGNSRFAWMTRKSEETITPWNFEEWD
KGASAQSFIERMTNFDKNLPNEKVLPKHSLLYEYFTVYNELTKVKYVTEGMRKPAFLSGEQKKAIV
DLLFKTNRKVTVKQLKEDYFKKIECFDSVEISGVEDRFNASLGTYHDLLKIIKDKDFLDNEENEDIL
EDIVLTLTLFEDREMIEERLKTYAHLFDDKVMKQLKRRRYTGWGRLSRKLINGIRDKQSGKTILDFL
KSDGFANRNFMQLIHDDSLTFKEDIQKAQVSGQGDSLHEHIANLAGSPAIKKGILQTVKWDELVK
VMGRHKPENIVIEMARENQTTQKGQKNSRERMKRIEEGIKELGSQILKEHPVENTQLQNEKLYLYY
LQNGRDMYVDQELDINRLSDYDVDHIVPQSFLKDDSIDNKVLTRSDKNRGKSDNVPSEEWKKMK
NYWRQLLNAKLITQRKFDNLTKAERGGLSELDKAGFIKRQLVETRQITKHVAQILDSRMNTKYDEN
DKLIREVKVITLKSKLVSDFRKDFQFYKVREINNYHHAHDAYLNAWGTALIKKYPKLESEFVYGDY
KVYDVRKMIAKSEQEIGKATAKYFFYSSGGSKRTADGSEFEPKKKRKV
ABEZe-NG-CP1041 monomer editor: NLS, linker, TadA*, SpCas9-NG-CP1041
(SEQ ID NO: 479)
MKKPADGSEEESPKKKRKVSEVEFSHEYWMRHALTLAKRARDEREVPVGAVLVLNNRVIGEGWN
RAIGLHDPTAHAEIMALRQGGLVMQNYRLIDATLYVTFEPCVMCAGAMIHSRIGRWFGVRNSKRG
AAGSLMNVLNYPGMNHRVEITEGILADECAALLCDFYRMPRQVFNAQKKAQSSINSGGSSGGSSG
SEYPGYSESATPESSGGSSGGSNIMNFFKTEITLANGEIRKRPLIETNGETGEIVWDKGRDFATVRK
VLSMPQVNIVKKTEVQTGGFSKESIRPKRNSDKLIARKKDWDPKKYGGFVSPTVAYSVLWAKVEK
GKSKKLKSVKELLGITIMERSSFEKNPIDFLEAKGYKEVKKDLIIKLPKYSLFELENGRKRMLASARF
LQKGNELALPSKYVNFLYLASHYEKLKGSPEDNEQKQLFVEQHKHYLDEIIEQISEFSKRVILADAN
LDKVLSAYNKHRDKPIREQAENIIHLFTLTNLGAPRAFKYFDTTIDRKVYRSTKEVLDATLIHQSITGL
YETRIDLSQLGGDGGSGGSGGSGGSGGSGGSGGDKKYSIGLAIGTNSVGWAVITDEYKVPSKKFKV
LGNTDRHSIKKNLIGALLFDSGETAEATRLKRTARRRYTRRKNRICYLQEIFSNEMAKVDDSFFHRLE
ESFLVEEDKKHERHPIFGNIVDEVAYHEKYPTIYHLRKKLVDSTDKADLRLIYLALAHMIKFRGHFLI
EGDLNPDNSDVDKLFIQLVQTYNQLFEENPINASGVDAKAILSARLSKSRRLENLIAQLPGEKKNGL
FGNLIALSLGLTPNFKSNFDLAEDAKLQLSKDTYDDDLDNLLAQIGDQYADLFLAAKNLSDAILLSD
ILRVNTEITKAPLSASMIKRYDEHHQDLTLLKALVRQQLPEKYKEIFFDQSKNGYAGYIDGGASQEE
FYKFIKPILEKMDGTEELLVKLNREDLLRKQRTFDNGSIPHQIHLGELHAILRRQEDFYPFLKDNRE
KIEKILTFRIPYYVGPLARGNSRFAWMTRKSEETITPWNFEEWDKGASAQSFIERMTNFDKNLPNE
KVLPKHSLLYEYFTVYNELTKVKYVTEGMRKPAFLSGEQKKAIVDLLFKTNRKVTVKQLKEDYFKKI
ECFDSVEISGVEDRFNASLGTYHDLLKIIKDKDFLDNEENEDILEDIVLTLTLFEDREMIEERLKTYA
HLFDDKVMKQLKRRRYTGWGRLSRKLINGIRDKQSGKTILDFLKSDGFANRNFMQLIHDDSLTFK
EDIQKAQVSGQGDSLHEHIANLAGSPAIKKGILQTVKWDELVKVMGRHKPENIVIEMARENQTTQ
KGQKNSRERMKRIEEGIKELGSQILKEHPVENTQLQNEKLYLYYLQNGRDMYVDQELDINRLSDYD
VDHIVPQSFLKDDSIDNKVLTRSDKNRGKSDNVPSEEWKKMKNYWRQLLNAKLITQRKFDNLTKA
ERGGLSELDKAGFIKRQLVETRQITKHVAQILDSRMNTKYDENDKLIREVKVITLKSKLVSDFRKDF
QFYKVREINNYHHAHDAYLNAWGTALIKKYPKLESEFVYGDYKVYDVRKMIAKSEQEIGKATAKYF
FYSSGGSKRTADGSEFEPKKKRKV
ABE8e-iSpyMac dimer editor: NLS, wtTadA, linker, TadA*, SpCas9-iSpyMac
(SEQ ID NO: 489)
MKRTADGSEFESPKKKRKVSEVEFSHEYWMRHALTLAKRAWDEREVPVGAVLVHN
NRVIGEGWNRPIGRHDPTAHAEIMALRQGGLVMQNYRLIDATLYVTLEPCVMCAGA
MIHSRIGRVVFGARDAKTGAAGSLMDVLHHPGMNHRVEITEGILADECAALLSDFFR
MRRQEIKAQKKAQSSTDSGGSSGGSSGSETPGTSESATPESSGGSSGGSSEVEFSHEYW
MRHALTLAKRARDEREVPVGAVLVLNNRVIGEGWNRAIGLHDPTAHAEIMALRQGGLVM
QNYRLIDATLYVTFEPCVMCAGAMIHSRIGRWFGVRNSKRGAAGSEMNVLNYPGMNHRV
EITEGILADECAALLCDFYRMPRQVFNAQKKAQSSINSGGSSGGSSGSETPGTSESATPES
SGGSSGGSDKKYSIGLDIGTNSVGWAVITDEYKVPSKKFKVLGNTDRHSIKKNLIGALLFD
SGETAEATRLKRTARRRYTRRKNRICYLQEIFSNEMAKVDDSFFHRLEESFLVEEDKKHER
HPIFGNIVDEVAYHEKYPTIYHLRKKLVDSTDKADLRLIYLALAHMIKFRGHFLIEGDLNPD
NSDVDKLFIQLVQTYNQLFEENPINASGVDAKAILSARLSKSRRLENLIAQLPGEKKNGLFG
NLIALSLGLTPNFKSNFDLAEDAKLQLSKDTYDDDLDNLLAQIGDQYADLFLAAKNLSDAI
LLSDILRVNTEITKAPLSASMIKRYDEHHQDLTLLKALVRQQLPEKYKEIFFDQSKNGYAGY
IDGGASQEEFYKFIKPILEKMDGTEELLVKLNREDLLRKQRTFDNGSIPHQIHLGELHAIL
RRQEDFYPFLKDNREKIEKILTFRIPYYVGPLARGNSRFAWMTRKSEETITPWNFEEWDK
GASAQSFIERMTNFDKNLPNEKVLPKHSLLYEYFTVYNELTKVKYVTEGMRKPAFLSGEQ
KKAIVDLLFKTNRKVTVKQLKEDYFKKIECFDSVEISGVEDRFNASLGTYHDLLKIIKDKDF
LDNEENEDILEDIVLTLTLFEDREMIEERLKTYAHLFDDKVMKQLKFRRYTGWGRLSRKLI
NGIRDKQSGKTILDFLKSDGFANRNFMQLIHDDSLTFKEDIQKAQVSGQGDSLHEHIANL
AGSPAIKKGILQTVKWDELVKVMGRHKPENIVIEMARENQTTQKGQKNSRERMKRIEEGI
KELGSQILKEHPVENTQLQNEKLYLYYLQNGRDMYVDQELDINRLSDYDVDHIVPQSFLK
DDSIDNKVLTRSDKNRGKSDNVPSEEWKKMKNYWRQLLNAKLITQRKFDNLTKAERGG
LSELDKAGFIKRQLVETRQITKHVAQILDSRMNTKYDENDKLIREVKVITLKSKLVSDFRKD
FQFYKVREINNYHHAHDAYLNAWGTALIKKYPKLESEFVYGDYKVYDVRKMIAKSEQEIG
KATAKYFFYSNIMNFFKTEITLANGEIRKRPLIETNGETGEIVWDKGRDFATVRKVLSMPQ
VNIVKKTESGGSKRTADGSEFEPKKKRKV
ABE8e-iSpyMac monomer editor: NLS, linker, TadA*, SpCas9-iSpyMac
(SEQ ID NO: 490)
MKRYKDGSEYESYKKKRKNSEVEFSHEYWMRHALTLAKRARDEREVPVGAVLVLNNRVIGEGWN
RAIGLHDPTAHAEIMALRQGGLVMQNYRLIDATLYVTFEPCVMCAGAMIHSRIGRWFGVRNSKRG
AAGSLMNVLNYPGMNHRVEITEGILADECAALLCDFYRMPRQVFNAQKKAQSSINSGGSSGGSSG
SETPGTSESATPESSGGSSGGSDKKYSIGLDIGTNSVGWAVITDEYKVPSKKFKVLGNTDRHSIKKN
LIGALLFDSGETAEATRLKRTARRRYTRRKNRICYLQEIFSNEMAKVDDSFFHRLEESFLVEEDKKHE
RHPIFGNIVDEVAYHEKYPTIYHLRKKLVDSTDKADLRLIYLALAHMIKFRGHFLIEGDLNPDNSDV
DKLFIQLVQTYNQLFEENPINASGVDAKAILSARLSKSRRLENLIAQLPGEKKNGLFGNLIALSLGLT
PNFKSNFDLAEDAKLQLSKDTYDDDLDNLLAQIGDQYADLFLAAKNLSDAILLSDILRVNTEITKAP
LSASMIKRYDEHHQDLTLLKALVRQQLPEKYKEIFFDQSKNGYAGYIDGGASQEEFYKFIKPILEKM
DGTEELLVKLNREDLLRKQRTFDNGSIPHQIHLGELHAILRRQEDFYPFLKDNREKIEKILTFRIPYY
VGPLARGNSRFAWMTRKSEETITPWNFEEWDKGASAQSFIERMTNFDKNLPNEKVLPKHSLLYEY
FTVYNELTKVKYVTEGMRKPAFLSGEQKKAIVDLLFKTNRKVTVKQLKEDYFKKIECFDSVEISGVE
DRFNASLGTYHDLLKIIKDKDFLDNEENEDILEDIVLTLTLFEDREMIEERLKTYAHLFDDKVMKQL
KRRRYTGWGRLSRKLINGIRDKQSGKTILDFLKSDGFANRNFMQLIHDDSLTFKEDIQKAQVSGQG
DSLHEHIANLAGSPAIKKGILQTVKWDELVKVMGRHKPENIVIEMARENQTTQKGQKNSRERMKR
IEEGIKELGSQILKEHPVENTQLQNEKLYLYYLQNGRDMYVDQELDINRLSDYDVDHIVPQSFLKD
DSIDNKVLTRSDKNRGKSDNVPSEEWKKMKNYWRQLLNAKLITQRKFDNLTKAERGGLSELDKA
GFIKRQLVETRQITKHVAQILDSRMNTKYDENDKLIREVKVITLKSKLVSDFRKDFQFYKVREINNYH
HAHDAYLNAWGTALIKKYPKLESEFVYGDYKVYDVRKMIAKSEQEIGKATAKYFFYSNIMNFFKTEI
TLANGEIRKRPLIETNGETGEIVWDKGRDFATVRKVLSMPQVNIVKKTESGGGGSKRTADGSEFEPKKKRKV

### Exemplary CBEs

[0390] In various embodiments, the present disclosure provides novel cytidine base editors (CBEs) comprising a napDNAbp domain and a cytidine deaminase domain that enzymatically deaminates a cytosine nucleobase of a C:G nucleobase pair to a uracil. The uracil may be subsequently converted to a thymine (T) by the cell's DNA repair and replication machinery. The mismatched guanine (G) on the opposite strand may subsequently be converted to an adenine (A) by the cell's DNA repair and replication machinery. In this manner, a target C:G nucleobase pair is ultimately converted to a T:A nucleobase pair.

[0391] The disclosed novel cytidine base editors exhibit increased on-target editing scope while maintaining minimized off-target DNA editing relative to existing CBEs. The CBEs described herein provide ˜10- to ˜100-fold lower average Cas9-independent off-target DNA editing, while maintaining efficient on-target editing at most positions targetable by existing CBEs. The disclosed CBEs comprise combinations of mutant cytidine deaminases, such as the YE1, YE2, YEE, and R33A deaminases, and Cas9 domains, and/or novel combinations of mutant cytidine deaminases, Cas9 domains, uracil glycosylase inhibitor (UGI) domains and nuclear localizations sequence (NLS) domains, relative to existing base editors. Existing base editors include BE3, which comprises the structure NH₂-[NLS]-[rAPOBEC1 deaminase]-[Cas9 nickase (D10A)]-[UGI domain]-[NLS]-COOH; BE4, which comprises the structure NH₂-[NLS]-[rAPOBEC1 deaminase]-[Cas9 nickase (D10A)]-[UGI domain]-[UGI domain]-[NLS]-COOH; and BE4max, which is a version of BE4 for which the codons of the base editor-encoding construct has been codon-optimized for expression in human cells.

[0392] Zuo et al. recently reported that, when overexpressed in mouse embryos and rice, BE3, the original CBE, induces an average random C:G-to-T:A mutation frequency of 5×10⁻⁸ per bp and 1.7×10⁻⁷ per bp, respectively. See “Cytidine base editor generates substantial off-target single-nucleotide variants in mouse embryos.” Science 364, 289-292 (2019), herein incorporated by reference. Editing was observed in sequences that had little to no similarity to the target sequences. These off-target edits may have arisen from the intrinsic DNA affinity of BE3's deaminase domain, independent of the guide RNA-programmed DNA binding of Cas9. See also Jin et al., Cytosine, but not adenine, base editors induce genome-wide off-target mutations in rice. Science 364, (2019), herein incorporated by reference.

[0393] Zuo et al. also found that Cas9-independent off-target editing events were enriched in transcribed regions of the genome, particularly in highly-expressed genes. Some of these were tumor suppressor genes. Accordingly, there is a need in the art to develop base editors that possess low off-target editing frequencies that may avoid undesired activation or inactivation of genes associated with diseases or disorders, such as cancer, and assays that rapidly measure the off-target editing frequencies of these base editors.

[0394] Exemplary CBEs may provide an off-target editing frequency of less than 2.0% after being contacted with a nucleic acid molecule comprising a target sequence, e.g., a target nucleobase pair. Further exemplary CBEs provide an off-target editing frequency of less than 1.5% after being contacted with a nucleic acid molecule comprising a target sequence comprising a target nucleobase pair. Further exemplary CBEs may provide an off-target editing frequency of less than 1.25%, less than 1.1%, less than 1%, less than 0.75%, less than 0.5%, less than 0.4%, less than 0.25%, less than 0.2%, less than 0.15%, less than 0.1%, less than 0.05%, or less than 0.025%, after being contacted with a nucleic acid molecule comprising a target sequence.

[0395] For instance, the cytidine base editors YE1-BE4, YE1-CP1028, YE1-SpCas9-NG (also referred to herein as YE1-NG), R33A-BE4, and R33A+K34A-BE4-CP1028, which are described below, may exhibit off-target editing frequencies of less than 0.75% (e.g., about 0.4% or less) while maintaining on-target editing efficiencies of about 60% or more, in target sequences in mammalian cells. Each of these base editors comprises modified cytidine deaminases (e.g., YE1, R33A, or R33A+K34A) and may further comprise a modified napDNAbp domain such as a circularly permuted Cas9 domain (e.g., CP1028) or a Cas9 domain with an expanded PAM window (e.g., SpCas9-NG). These five base editors may be the most preferred for applications in which off-target editing, and in particular Cas9-independent off-target editing, must be minimized. In particular, base editors comprising a YE1 deaminase domain provide efficient on-target editing with greatly decreased Cas9-independent editing, as confirmed by whole-genome sequencing.

[0396] Exemplary CBEs may further possess an on-target editing efficiency of more than 50% after being contacted with a nucleic acid molecule comprising a target sequence. Further exemplary CBEs possess an on-target editing efficiency of more than 60% after being contacted with a nucleic acid molecule comprising a target sequence. Further exemplary CBEs possess an on-target editing efficiency of more than 65%, more than 70%, more than 75%, more than 80%, more than 82.5%, or more than 85% after being contacted with a nucleic acid molecule comprising a target sequence.

[0397] The disclosed CBEs may exhibit indel frequencies of less than 0.75%, less than 0.6%, less than 0.5%, less than 0.4%, less than 0.3%, or less than 0.2% after being contacted with a nucleic acid molecule containing a target sequence. The disclosed CBEs may further exhibit reduced RNA off-target editing relative to existing CBEs. The disclosed CBEs may further result in increased product purity after being contacted with a nucleic acid molecule containing a target sequence relative to existing CBEs.

[0398] The disclosed CBEs may further comprise one or more nuclear localization signals (NLSs) and/or two or more uracil glycosylase inhibitor (UGI) domains. Thus, the base editors may comprise the structure: NH₂-[first nuclear localization sequence]-[cytidine deaminase domain]-[napDNAbp domain]-[first UGI domain]-[second UGI domain]-[second nuclear localization sequence]-COOH, wherein each instance of “]-[” indicates the presence of an optional linker sequence. Exemplary CBEs may have a structure that comprises the “BE4max” architecture, with an NH₂-[NLS]-[cytidine deaminase]-[Cas9 nickase]-[UGI domain]-[UGI domain]-[NLS]-COOH structure, having optimized nuclear localization signals and wherein the napDNAbp domain comprises a Cas9 nickase. This BE4max structure was reported to have optimized codon usage for expression in human cells, as reported in Koblan et al., Nat Biotechnol. 2018; 36(9):843-846, herein incorporated by reference.

[0399] In other embodiments, exemplary CBEs may have a structure that comprises a modified BE4max architecture that contains a napDNAbp domain comprising a Cas9 variant other than Cas9 nickase, such as SpCas9-NG, xCas9, or circular permutant CP1028. Accordingly, exemplary CBEs may comprise the structure: NH₂-[NLS]-[cytidine deaminase]-[CP1028]-[UGI domain]-[UGI domain]-[NLS]-COOH; NH₂-[NLS]-[cytidine deaminase]-[xCas9]-[UGI domain]-[UGI domain]-[NLS]-COOH; or NH₂-[NLS]-[cytidine deaminase]-[SpCas9-NG]-[UGI domain]-[UGI domain]-[NLS]-COOH, wherein each instance of “]-[” indicates the presence of an optional linker sequence.

[0400] The disclosed CBEs may comprise modified (or evolved) cytidine deaminase domains, such as deaminase domains that recognize an expanded PAM sequence, have improved efficiency of deaminating 5′-GC targets, and/or make edits in a narrower target window, In some embodiments, the disclosed cytidine base editors comprise evolved nucleic acid programmable DNA binding proteins (napDNAbp), such as an evolved Cas9.

[0401] Exemplary cytidine base editors comprise sequences that are at least least 85%, at least 90%, at least 95%, at least 98%, at least 99%, or at least 99.5% identical to the following amino acid sequences, SEQ ID NOs: 223-248.

[0402] Where indicated, “—BE4” refers to the BE4max architecture, or NH₂-[first nuclear localization sequence]-[cytidine deaminase domain]-[32aa linker]-[SpCas9 nickase (nCas9, or nSpCas9) domain]-[9aa linker]-[first UGI domain]-[9aa-linker]-[second UGI domain]-[second nuclear localization sequence]-COOH. Where indicated, “BE4max, modified with SpCas9-NG” and “—SpCas9-NG” refer to a modified BE4max architecture in which the SpCas9 nickase domain has been replaced with an SpCas9-NG, i.e., NH₂-[first nuclear localization sequence]-[cytidine deaminase domain]-[32aa linker]-[SpCas9-NG]-[9aa linker]-[first UGI domain]-[9aa-linker]-[second UGI domain]-[second nuclear localization sequence]-COOH. And where indicated, “BE4-CP1028” refers to a modified BE4max architecture in which the Cas9 nickase domain has been replaced with a S. pyogenes CP1028, i.e., NH₂-[first nuclear localization sequence]-[cytidine deaminase domain]-[32aa linker]-[CP1028]-[9aa linker]-[first UGI domain]-[9aa-linker]-[second UGI domain]-[second nuclear localization sequence]-COOH.

[0403] As discussed above, preferred base editors comprise modified cytidine deaminases (e.g., YE1, R33A, or R33A+K34A) and may further comprise a modified napDNAbp domain such as a circularly permuted Cas9 domain (e.g., CP1028) or a Cas9 domain with an expanded PAM window (e.g., SpCas9-NG). The napDNAbp domains in the following amino acid sequences are indicated in italics.

BE4max
(SEQ ID NO: 223)
MKRTADGSEFESPKKKRKVSSETGPVAVDPTLRRRIEPHEFEVFFDPRELRKETCLLY
EINWGGRHSIWRHTSQNTNKHVEVNFIEKFTTERYFCPNTRCSITWFLSWSPCGECSR
AITEFLSRYPHVTLFIYIARLYHHADPRNRQGLRDLISSGVTIQIMTEQESGYCWRNFV
NYSPSNEAHWPRYPHLWVRLYVLELYCIILGLPPCLNILRRKQPQLTFFTIALQSCHY
QRLPPHILWATGLKSGGSSGGSSGSETPGTSESATPESSGGSSGGSDKKYSIGLAIGTNS
VGWAVITDEYKVPSKKFKVLGNTDRHSIKKNLIGALLFDSGETAEATRLKRTARRRYTRRK
NRICYLQEIFSNEMAKVDDSFFHRLEESFLVEEDKKHERHPIFGNIVDEVAYHEKYPTIYHL
RKKLVDSTDKADLRLIYLALAHMIKFRGHFLIEGDLNPDNSDVDKLFIQLVQTYNQLFEEN
PINASGVDAKAILSARLSKSRRLENLIAQLPGEKKNGLFGNLIALSLGLTPNFKSNFDLAED
AKLQLSKDTYDDDLDNLLAQIGDQYADLFLAAKNLSDAILLSDILRVNTEITKAPLSASMIK
RYDEHHQDLTLLKALVRQQLPEKYKEIFFDQSKNGYAGYIDGGASQEEFYKFIKPILEKM
DGTEELLVKLNREDLLRKQRTFDNGSIPHQIHLGELHAILRRQEDFYPFLKDNREKIEKIL
TFRIPYYVGPLARGNSRFAWMTRKSEETITPWNFEEVVDKGASAQSFIERMTNFDKNLPNE
KVLPKHSLLYEYFTVYNELTKVKYVTEGMRKPAFLSGEQKKAIVDLLFKTNRKVTVKQLKE
DYFKKIECFDSVEISGVEDRFNASLGTYHDLLKIIKDKDFLDNEENEDILEDIVLTLTLFED
REMIEERLKTYAHLFDDKVMKQLKRRRYTGWGRLSRKLINGIRDKQSGKTILDFLKSDGF
ANRNFMQLIHDDSLTFKEDIQKAQVSGQGDSLHEHIANLAGSPAIKKGILQTVKVVDELV
KVMGRHKPENIVIEMARENQTTQKGQKNSRERMKRIEEGIKELGSQILKEHPVENTQLQN
EKLYLYYLQNGRDMYVDQELDINRLSDYDVDHIVPQSFLKDDSIDNKVLTRSDKNRGKSD
NVPSEEVVKKMKNYWRQLLNAKLITQRKFDNLTKAERGGLSELDKAGFIKRQLVETRQIT
KHVAQILDSRMNTKYDENDKLIREVKVITLKSKLVSDFRKDFQFYKVREINNYHHAHDAYL
NAVVGTALIKKYPKLESEFVYGDYKVYDVRKMIAKSEQEIGKATAKYFFYSNIMNFFKTEIT
LANGEIRKRPLIETNGETGEIVWDKGRDFATVRKVLSMPQVNIVKKTEVQTGGFSKESILP
KRNSDKLIARKKDWDPKKYGGFDSPTVAYSVLVVAKVEKGKSKKLKSVKELLGITIMERSS
FEKNPIDFLEAKGYKEVKKDLIIKLPKYSLFELENGRKRMLASAGELQKGNELALPSKYVN
FLYLASHYEKLKGSPEDNEQKQLFVEQHKHYLDEIIEQISEFSKRVILADANLDKVLSAYNK
HRDKPIREQAENIIHLFTLTNLGAPAAFKYFDTTIDRKRYTSTKEVLDATLIHQSITGLYETRI
DLSQLGGDSGGSGGSGGSTNLSDIIEKETGKQLVIQESILMLPEEVEEVIGNKPESDILV
HTAYDESTDENVMLLTSDAPEYKPWALVIQDSNGENKIKMLSGGSGGSGGSTNLSDI
IEKETGKQLVIQESILMLPEEVEEVIGNKPESDILVHTAYDESTDENVMLLTSDAPEYK
PWALVIQDSNGENKIKMLSGGSKRTADGSEFEPKKKRKV
YE1-BE4
(SEQ ID NO: 224)
MKRTADGSEFESPKKKRKVSSETGPVAVDPTLRRRIEPHEFEVFFDPRELRKETCLLY
EINWGGRHSIWRHTSQNTNKHVEVNFIEKFTTERYFCPNTRCSITWFLSYSPCGECSR
AITEFLSRYPHVTLFIYIARLYHHADPENRQGLRDLISSGVTIQIMTEQESGYCWRNFV
NYSPSNEAHWPRYPHLWVRLYVLELYCIILGLPPCLNILRRKQPQLTFFTIALQSCHY
QRLPPHILWATGLKSGGSSGGSSGSETPGTSESATPESSGGSSGGSDKKYSIGLAIGTNS
VGWAVITDEYKVPSKKFKVLGNTDRHSIKKNLIGALLFDSGETAEATRLKRTARRRYTRRK
NRICYLQEIFSNEMAKVDDSFFHRLEESFLVEEDKKHERHPIFGNIVDEVAYHEKYPTIYHL
RKKLVDSTDKADLRLIYLALAHMIKFRGHFLIEGDLNPDNSDVDKLFIQLVQTYNQLFEEN
PINASGVDAKAILSARLSKSRRLENLIAQLPGEKKNGLFGNLIALSLGLTPNFKSNFDLAED
AKLQLSKDTYDDDLDNLLAQIGDQYADLFLAAKNLSDAILLSDILRVNTEITKAPLSASMIK
RYDEHHQDLTLLKALVRQQLPEKYKEIFFDQSKNGYAGYIDGGASQEEFYKFIKPILEKM
DGTEELLVKLNREDLLRKQRTFDNGSIPHQIHLGELHAILRRQEDFYPFLKDNREKIEKIL
TFRIPYYVGPLARGNSRFAWMTRKSEETITPWNFEEVVDKGASAQSFIERMTNFDKNLPNE
KVLPKHSLLYEYFTVYNELTKVKYVTEGMRKPAFLSGEQKKAIVDLLFKTNRKVTVKQLKE
DYFKKIECFDSVEISGVEDRFNASLGTYHDLLKIIKDKDFLDNEENEDILEDIVLTLTLFED
REMIEERLKTYAHLFDDKVMKQLKRRRYTGWGRLSRKLINGIRDKQSGKTILDFLKSDGF
ANRNFMQLIHDDSLTFKEDIQKAQVSGQGDSLHEHIANLAGSPAIKKGILQTVKVVDELV
KVMGRHKPENIVIEMARENQTTQKGQKNSRERMKRIEEGIKELGSQILKEHPVENTQLQN
EKLYLYYLQNGRDMYVDQELDINRLSDYDVDHIVPQSFLKDDSIDNKVLTRSDKNRGKSD
NVPSEEVVKKMKNYWRQLLNAKLITQRKFDNLTKAERGGLSELDKAGFIKRQLVETRQIT
KHVAQILDSRMNTKYDENDKLIREVKVITLKSKLVSDFRKDFQFYKVREINNYHHAHDAYL
NAVVGTALIKKYPKLESEFVYGDYKVYDVRKMIAKSEQEIGKATAKYFFYSNIMNFFKTEIT
LANGEIRKRPLIETNGETGEIVWDKGRDFATVRKVLSMPQVNIVKKTEVQTGGFSKESILP
KRNSDKLIARKKDWDPKKYGGFDSPTVAYSVLVVAKVEKGKSKKLKSVKELLGITIMERSS
FEKNPIDFLEAKGYKEVKKDLIIKLPKYSLFELENGRKRMLASAGELQKGNELALPSKYVN
FLYLASHYEKLKGSPEDNEQKQLFVEQHKHYLDEIIEQISEFSKRVILADANLDKVLSAYNK
HRDKPIREQAENIIHLFTLTNLGAPAAFKYFDTTIDRKRYTSTKEVLDATLIHQSITGLYETRI
DLSQLGGDSGGSGGSGGSTNLSDIIEKETGKQLVIQESILMLPEEVEEVIGNKPESDILV
HTAYDESTDENVMLLTSDAPEYKPWALVIQDSNGENKIKMLSGGSGGSGGSTNLSDI
IEKETGKQLVIQESILMLPEEVEEVIGNKPESDILVHTAYDESTDENVMLLTSDAPEYK
PWALVIQDSNGENKIKMLSGGSKRTADGSEFEPKKKRKV
YE2-BE4
(SEQ ID NO: 225)
MKRTADGSEFESPKKKRKVSSETGPVAVDPTLRRRIEPHEFEVFFDPRELRKETCLLY
EINWGGRHSIWRHTSQNTNKHVEVNFIEKFTTERYFCPNTRCSITWFLSYSPCGECSR
AITEFLSRYPHVTLFIYIARLYHHADPRNRQGLEDLISSGVTIQIMTEQESGYCWRNFV
NYSPSNEAHWPRYPHLWVRLYVLELYCIILGLPPCLNILRRKQPQLTFFTIALQSCHY
QRLPPHILWATGLKSGGSSGGSSGSETPGTSESATPESSGGSSGGSDKKYSIGLAIGTNS
VGWAVITDEYKVPSKKFKVLGNTDRHSIKKNLIGALLFDSGETAEATRLKRTARRRYTRRK
NRICYLQEIFSNEMAKVDDSFFHRLEESFLVEEDKKHERHPIFGNIVDEVAYHEKYPTIYHL
RKKLVDSTDKADLRLIYLALAHMIKFRGHFLIEGDLNPDNSDVDKLFIQLVQTYNQLFEEN
PINASGVDAKAILSARLSKSRRLENLIAQLPGEKKNGLFGNLIALSLGLTPNFKSNFDLAED
AKLQLSKDTYDDDLDNLLAQIGDQYADLFLAAKNLSDAILLSDILRVNTEITKAPLSASMIK
RYDEHHQDLTLLKALVRQQLPEKYKEIFFDQSKNGYAGYIDGGASQEEFYKFIKPILEKM
DGTEELLVKLNREDLLRKQRTFDNGSIPHQIHLGELHAILRRQEDFYPFLKDNREKIEKIL
TFRIPYYVGPLARGNSRFAWMTRKSEETITPWNFEEVVDKGASAQSFIERMTNFDKNLPNE
KVLPKHSLLYEYFTVYNELTKVKYVTEGMRKPAFLSGEQKKAIVDLLFKTNRKVTVKQLKE
DYFKKIECFDSVEISGVEDRFNASLGTYHDLLKIIKDKDFLDNEENEDILEDIVLTLTLFED
REMIEERLKTYAHLFDDKVMKQLKRRRYTGWGRLSRKLINGIRDKQSGKTILDFLKSDGF
ANRNFMQLIHDDSLTFKEDIQKAQVSGQGDSLHEHIANLAGSPAIKKGILQTVKVVDELV
KVMGRHKPENIVIEMARENQTTQKGQKNSRERMKRIEEGIKELGSQILKEHPVENTQLQN
EKLYLYYLQNGRDMYVDQELDINRLSDYDVDHIVPQSFLKDDSIDNKVLTRSDKNRGKSD
NVPSEEVVKKMKNYWRQLLNAKLITQRKFDNLTKAERGGLSELDKAGFIKRQLVETRQIT
KHVAQILDSRMNTKYDENDKLIREVKVITLKSKLVSDFRKDFQFYKVREINNYHHAHDAYL
NAVVGTALIKKYPKLESEFVYGDYKVYDVRKMIAKSEQEIGKATAKYFFYSNIMNFFKTEIT
LANGEIRKRPLIETNGETGEIVWDKGRDFATVRKVLSMPQVNIVKKTEVQTGGFSKESILP
KRNSDKLIARKKDWDPKKYGGFDSPTVAYSVLVVAKVEKGKSKKLKSVKELLGITIMERSS
FEKNPIDFLEAKGYKEVKKDLIIKLPKYSLFELENGRKRMLASAGELQKGNELALPSKYVN
FLYLASHYEKLKGSPEDNEQKQLFVEQHKHYLDEIIEQISEFSKRVILADANLDKVLSAYNK
HRDKPIREQAENIIHLFTLTNLGAPAAFKYFDTTIDRKRYTSTKEVLDATLIHQSITGLYETRI
DLSQLGGDSGGSGGSGGSTNLSDIIEKETGKQLVIQESILMLPEEVEEVIGNKPESDILV
HTAYDESTDENVMLLTSDAPEYKPWALVIQDSNGENKIKMLSGGSGGSGGSTNLSDI
IEKETGKQLVIQESILMLPEEVEEVIGNKPESDILVHTAYDESTDENVMLLTSDAPEYK
PWALVIQDSNGENKIKMLSGGSKRTADGSEFEPKKKRKV
YEE-BE4
(SEQ ID NO: 226)
MKRTADGSEFESPKKKRKVSSETGPVAVDPTLRRRIEPHEFEVFFDPRELRKETCLLY
EINWGGRHSIWRHTSQNTNKHVEVNFIEKFTTERYFCPNTRCSITWFLSYSPCGECSR
AITEFLSRYPHVTLFIYIARLYHHADPENRQGLEDLISSGVTIQIMTEQESGYCWRNFV
NYSPSNEAHWPRYPHLWVRLYVLELYCIILGLPPCLNILRRKQPQLTFFTIALQSCHY
QRLPPHILWATGLKSGGSSGGSSGSETPGTSESATPESSGGSSGGSDKKYSIGLAIGTNS
VGWAVITDEYKVPSKKFKVLGNTDRHSIKKNLIGALLFDSGETAEATRLKRTARRRYTRRK
NRICYLQEIFSNEMAKVDDSFFHRLEESFLVEEDKKHERHPIFGNIVDEVAYHEKYPTIYHL
RKKLVDSTDKADLRLIYLALAHMIKFRGHFLIEGDLNPDNSDVDKLFIQLVQTYNQLFEEN
PINASGVDAKAILSARLSKSRRLENLIAQLPGEKKNGLFGNLIALSLGLTPNFKSNFDLAED
AKLQLSKDTYDDDLDNLLAQIGDQYADLFLAAKNLSDAILLSDILRVNTEITKAPLSASMIK
RYDEHHQDLTLLKALVRQQLPEKYKEIFFDQSKNGYAGYIDGGASQEEFYKFIKPILEKM
DGTEELLVKLNREDLLRKQRTFDNGSIPHQIHLGELHAILRRQEDFYPFLKDNREKIEKIL
TFRIPYYVGPLARGNSRFAWMTRKSEETITPWNFEEVVDKGASAQSFIERMTNFDKNLPNE
KVLPKHSLLYEYFTVYNELTKVKYVTEGMRKPAFLSGEQKKAIVDLLFKTNRKVTVKQLKE
DYFKKIECFDSVEISGVEDRFNASLGTYHDLLKIIKDKDFLDNEENEDILEDIVLTLTLFED
REMIEERLKTYAHLFDDKVMKQLKRRRYTGWGRLSRKLINGIRDKQSGKTILDFLKSDGF
ANRNFMQLIHDDSLTFKEDIQKAQVSGQGDSLHEHIANLAGSPAIKKGILQTVKVVDELV
KVMGRHKPENIVIEMARENQTTQKGQKNSRERMKRIEEGIKELGSQILKEHPVENTQLQN
EKLYLYYLQNGRDMYVDQELDINRLSDYDVDHIVPQSFLKDDSIDNKVLTRSDKNRGKSD
NVPSEEVVKKMKNYWRQLLNAKLITQRKFDNLTKAERGGLSELDKAGFIKRQLVETRQIT
KHVAQILDSRMNTKYDENDKLIREVKVITLKSKLVSDFRKDFQFYKVREINNYHHAHDAYL
NAVVGTALIKKYPKLESEFVYGDYKVYDVRKMIAKSEQEIGKATAKYFFYSNIMNFFKTEIT
LANGEIRKRPLIETNGETGEIVWDKGRDFATVRKVLSMPQVNIVKKTEVQTGGFSKESILP
KRNSDKLIARKKDWDPKKYGGFDSPTVAYSVLVVAKVEKGKSKKLKSVKELLGITIMERSS
FEKNPIDFLEAKGYKEVKKDLIIKLPKYSLFELENGRKRMLASAGELQKGNELALPSKYVN
FLYLASHYEKLKGSPEDNEQKQLFVEQHKHYLDEIIEQISEFSKRVILADANLDKVLSAYNK
HRDKPIREQAENIIHLFTLTNLGAPAAFKYFDTTIDRKRYTSTKEVLDATLIHQSITGLYETRI
DLSQLGGDSGGSGGSGGSTNLSDIIEKETGKQLVIQESILMLPEEVEEVIGNKPESDILV
HTAYDESTDENVMLLTSDAPEYKPWALVIQDSNGENKIKMLSGGSGGSGGSTNLSDI
IEKETGKQLVIQESILMLPEEVEEVIGNKPESDILVHTAYDESTDENVMLLTSDAPEYK
PWALVIQDSNGENKIKMLSGGSKRTADGSEFEPKKKRKV
EE-BE4
(SEQ ID NO: 227)
MKRTADGSEFESPKKKRKVSSETGPVAVDPTLRRRIEPHEFEVFFDPRELRKETCLLY
EINWGGRHSIWRHTSQNTNKHVEVNFIEKFTTERYFCPNTRCSITWFLSWSPCGECSR
AITEFLSRYPHVTLFIYIARLYHHADPENRQGLEDLISSGVTIQIMTEQESGYCWRNFV
NYSPSNEAHWPRYPHLWVRLYVLELYCIILGLPPCLNILRRKQPQLTFFTIALQSCHY
QRLPPHILWATGLKSGGSSGGSSGSETPGTSESATPESSGGSSGGSDKKYSIGLAIGTNS
VGWAVITDEYKVPSKKFKVLGNTDRHSIKKNLIGALLFDSGETAEATRLKRTARRRYTRRK
NRICYLQEIFSNEMAKVDDSFFHRLEESFLVEEDKKHERHPIFGNIVDEVAYHEKYPTIYHL
RKKLVDSTDKADLRLIYLALAHMIKFRGHFLIEGDLNPDNSDVDKLFIQLVQTYNQLFEEN
PINASGVDAKAILSARLSKSRRLENLIAQLPGEKKNGLFGNLIALSLGLTPNFKSNFDLAED
AKLQLSKDTYDDDLDNLLAQIGDQYADLFLAAKNLSDAILLSDILRVNTEITKAPLSASMIK
RYDEHHQDLTLLKALVRQQLPEKYKEIFFDQSKNGYAGYIDGGASQEEFYKFIKPILEKM
DGTEELLVKLNREDLLRKQRTFDNGSIPHQIHLGELHAILRRQEDFYPFLKDNREKIEKIL
TFRIPYYVGPLARGNSRFAWMTRKSEETITPWNFEEVVDKGASAQSFIERMTNFDKNLPNE
KVLPKHSLLYEYFTVYNELTKVKYVTEGMRKPAFLSGEQKKAIVDLLFKTNRKVTVKQLKE
DYFKKIECFDSVEISGVEDRFNASLGTYHDLLKIIKDKDFLDNEENEDILEDIVLTLTLFED
REMIEERLKTYAHLFDDKVMKQLKRRRYTGWGRLSRKLINGIRDKQSGKTILDFLKSDGF
ANRNFMQLIHDDSLTFKEDIQKAQVSGQGDSLHEHIANLAGSPAIKKGILQTVKVVDELV
KVMGRHKPENIVIEMARENQTTQKGQKNSRERMKRIEEGIKELGSQILKEHPVENTQLQN
EKLYLYYLQNGRDMYVDQELDINRLSDYDVDHIVPQSFLKDDSIDNKVLTRSDKNRGKSD
NVPSEEVVKKMKNYWRQLLNAKLITQRKFDNLTKAERGGLSELDKAGFIKRQLVETRQIT
KHVAQILDSRMNTKYDENDKLIREVKVITLKSKLVSDFRKDFQFYKVREINNYHHAHDAYL
NAVVGTALIKKYPKLESEFVYGDYKVYDVRKMIAKSEQEIGKATAKYFFYSNIMNFFKTEIT
LANGEIRKRPLIETNGETGEIVWDKGRDFATVRKVLSMPQVNIVKKTEVQTGGFSKESILP
KRNSDKLIARKKDWDPKKYGGFDSPTVAYSVLVVAKVEKGKSKKLKSVKELLGITIMERSS
FEKNPIDFLEAKGYKEVKKDLIIKLPKYSLFELENGRKRMLASAGELQKGNELALPSKYVN
FLYLASHYEKLKGSPEDNEQKQLFVEQHKHYLDEIIEQISEFSKRVILADANLDKVLSAYNK
HRDKPIREQAENIIHLFTLTNLGAPAAFKYFDTTIDRKRYTSTKEVLDATLIHQSITGLYETRI
DLSQLGGDSGGSGGSGGSTNLSDIIEKETGKQLVIQESILMLPEEVEEVIGNKPESDILV
HTAYDESTDENVMLLTSDAPEYKPWALVIQDSNGENKIKMLSGGSGGSGGSTNLSDI
IEKETGKQLVIQESILMLPEEVEEVIGNKPESDILVHTAYDESTDENVMLLTSDAPEYK
PWALVIQDSNGENKIKMLSGGSKRTADGSEFEPKKKRKV
R33A-BE4
(SEQ ID NO: 228)
MKRTADGSEFESPKKKRKVSSETGPVAVDPTLRRRIEPHEFEVFFDPRELAKETCLLY
EINWGGRHSIWRHTSQNTNKHVEVNFIEKFTTERYFCPNTRCSITWFLSWSPCGECSR
AITEFLSRYPHVTLFIYIARLYHHADPRNRQGLRDLISSGVTIQIMTEQESGYCWRNFV
NYSPSNEAHWPRYPHLWVRLYVLELYCIILGLPPCLNILRRKQPQLTFFTIALQSCHY
QRLPPHILWATGLKSGGSSGGSSGSETPGTSESATPESSGGSSGGSDKKYSIGLAIGTNS
VGWAVITDEYKVPSKKFKVLGNTDRHSIKKNLIGALLFDSGETAEATRLKRTARRRYTRRK
NRICYLQEIFSNEMAKVDDSFFHRLEESFLVEEDKKHERHPIFGNIVDEVAYHEKYPTIYHL
RKKLVDSTDKADLRLIYLALAHMIKFRGHFLIEGDLNPDNSDVDKLFIQLVQTYNQLFEEN
PINASGVDAKAILSARLSKSRRLENLIAQLPGEKKNGLFGNLIALSLGLTPNFKSNFDLAED
AKLQLSKDTYDDDLDNLLAQIGDQYADLFLAAKNLSDAILLSDILRVNTEITKAPLSASMIK
RYDEHHQDLTLLKALVRQQLPEKYKEIFFDQSKNGYAGYIDGGASQEEFYKFIKPILEKM
DGTEELLVKLNREDLLRKQRTFDNGSIPHQIHLGELHAILRRQEDFYPFLKDNREKIEKIL
TFRIPYYVGPLARGNSRFAWMTRKSEETITPWNFEEVVDKGASAQSFIERMTNFDKNLPNE
KVLPKHSLLYEYFTVYNELTKVKYVTEGMRKPAFLSGEQKKAIVDLLFKTNRKVTVKQLKE
DYFKKIECFDSVEISGVEDRFNASLGTYHDLLKIIKDKDFLDNEENEDILEDIVLTLTLFED
REMIEERLKTYAHLFDDKVMKQLKRRRYTGWGRLSRKLINGIRDKQSGKTILDFLKSDGF
ANRNFMQLIHDDSLTFKEDIQKAQVSGQGDSLHEHIANLAGSPAIKKGILQTVKVVDELV
KVMGRHKPENIVIEMARENQTTQKGQKNSRERMKRIEEGIKELGSQILKEHPVENTQLQN
EKLYLYYLQNGRDMYVDQELDINRLSDYDVDHIVPQSFLKDDSIDNKVLTRSDKNRGKSD
NVPSEEVVKKMKNYWRQLLNAKLITQRKFDNLTKAERGGLSELDKAGFIKRQLVETRQIT
KHVAQILDSRMNTKYDENDKLIREVKVITLKSKLVSDFRKDFQFYKVREINNYHHAHDAYL
NAVVGTALIKKYPKLESEFVYGDYKVYDVRKMIAKSEQEIGKATAKYFFYSNIMNFFKTEIT
LANGEIRKRPLIETNGETGEIVWDKGRDFATVRKVLSMPQVNIVKKTEVQTGGFSKESILP
KRNSDKLIARKKDWDPKKYGGFDSPTVAYSVLVVAKVEKGKSKKLKSVKELLGITIMERSS
FEKNPIDFLEAKGYKEVKKDLIIKLPKYSLFELENGRKRMLASAGELQKGNELALPSKYVN
FLYLASHYEKLKGSPEDNEQKQLFVEQHKHYLDEIIEQISEFSKRVILADANLDKVLSAYNK
HRDKPIREQAENIIHLFTLTNLGAPAAFKYFDTTIDRKRYTSTKEVLDATLIHQSITGLYETRI
DLSQLGGDSGGSGGSGGSTNLSDIIEKETGKQLVIQESILMLPEEVEEVIGNKPESDILV
HTAYDESTDENVMLLTSDAPEYKPWALVIQDSNGENKIKMLSGGSGGSGGSTNLSDI
IEKETGKQLVIQESILMLPEEVEEVIGNKPESDILVHTAYDESTDENVMLLTSDAPEYK
PWALVIQDSNGENKIKMLSGGSKRTADGSEFEPKKKRKV
R33A + K34A-BE4
(SEQ ID NO: 229)
MKRTADGSEFESPKKKRKVSSETGPVAVDPTLRRRIEPHEFEVFFDPRELAAETCLLY
EINWGGRHSIWRHTSQNTNKHVEVNFIEKFTTERYFCPNTRCSITWFLSWSPCGECSR
AITEFLSRYPHVTLFIYIARLYHHADPRNRQGLRDLISSGVTIQIMTEQESGYCWRNFV
NYSPSNEAHWPRYPHLWVRLYVLELYCIILGLPPCLNILRRKQPQLTFFTIALQSCHY
QRLPPHILWATGLKSGGSSGGSSGSETPGTSESATPESSGGSSGGSDKKYSIGLAIGTNS
VGWAVITDEYKVPSKKFKVLGNTDRHSIKKNLIGALLFDSGETAEATRLKRTARRRYTRRK
NRICYLQEIFSNEMAKVDDSFFHRLEESFLVEEDKKHERHPIFGNIVDEVAYHEKYPTIYHL
RKKLVDSTDKADLRLIYLALAHMIKFRGHFLIEGDLNPDNSDVDKLFIQLVQTYNQLFEEN
PINASGVDAKAILSARLSKSRRLENLIAQLPGEKKNGLFGNLIALSLGLTPNFKSNFDLAED
AKLQLSKDTYDDDLDNLLAQIGDQYADLFLAAKNLSDAILLSDILRVNTEITKAPLSASMIK
RYDEHHQDLTLLKALVRQQLPEKYKEIFFDQSKNGYAGYIDGGASQEEFYKFIKPILEKM
DGTEELLVKLNREDLLRKQRTFDNGSIPHQIHLGELHAILRRQEDFYPFLKDNREKIEKIL
TFRIPYYVGPLARGNSRFAWMTRKSEETITPWNFEEVVDKGASAQSFIERMTNFDKNLPNE
KVLPKHSLLYEYFTVYNELTKVKYVTEGMRKPAFLSGEQKKAIVDLLFKTNRKVTVKQLKE
DYFKKIECFDSVEISGVEDRFNASLGTYHDLLKIIKDKDFLDNEENEDILEDIVLTLTLFED
REMIEERLKTYAHLFDDKVMKQLKRRRYTGWGRLSRKLINGIRDKQSGKTILDFLKSDGF
ANRNFMQLIHDDSLTFKEDIQKAQVSGQGDSLHEHIANLAGSPAIKKGILQTVKVVDELV
KVMGRHKPENIVIEMARENQTTQKGQKNSRERMKRIEEGIKELGSQILKEHPVENTQLQN
EKLYLYYLQNGRDMYVDQELDINRLSDYDVDHIVPQSFLKDDSIDNKVLTRSDKNRGKSD
NVPSEEVVKKMKNYWRQLLNAKLITQRKFDNLTKAERGGLSELDKAGFIKRQLVETRQIT
KHVAQILDSRMNTKYDENDKLIREVKVITLKSKLVSDFRKDFQFYKVREINNYHHAHDAYL
NAVVGTALIKKYPKLESEFVYGDYKVYDVRKMIAKSEQEIGKATAKYFFYSNIMNFFKTEIT
LANGEIRKRPLIETNGETGEIVWDKGRDFATVRKVLSMPQVNIVKKTEVQTGGFSKESILP
KRNSDKLIARKKDWDPKKYGGFDSPTVAYSVLVVAKVEKGKSKKLKSVKELLGITIMERSS
FEKNPIDFLEAKGYKEVKKDLIIKLPKYSLFELENGRKRMLASAGELQKGNELALPSKYVN
FLYLASHYEKLKGSPEDNEQKQLFVEQHKHYLDEIIEQISEFSKRVILADANLDKVLSAYNK
HRDKPIREQAENIIHLFTLTNLGAPAAFKYFDTTIDRKRYTSTKEVLDATLIHQSITGLYETRI
DLSQLGGDSGGSGGSGGSTNLSDIIEKETGKQLVIQESILMLPEEVEEVIGNKPESDILV
HTAYDESTDENVMLLTSDAPEYKPWALVIQDSNGENKIKMLSGGSGGSGGSTNLSDI
IEKETGKQLVIQESILMLPEEVEEVIGNKPESDILVHTAYDESTDENVMLLTSDAPEYK
PWALVIQDSNGENKIKMLSGGSKRTADGSEFEPKKKRKV
APOBEC3A (A3A)-BE4
(SEQ ID NO: 230)
MKRTADGSEFESPKKKRKVSEASPASGPRHLMDPHIFTSNFNNGIGRHKTYLCYEVE
RLDNGTSVKMDQHRGFLHNQAKNLLCGFYGRHAELRFLDLVPSLQLDPAQIYRVT
WFISWSPCFSWGCAGEVRAFLQENTHVRLRIFAARIYDYDPLYKEALQMLRDAGAQ
VSIMTYDEFKHCWDTFVDHQGCPFQPWDGLDEHSQALSGRLRAILQNQGNSGGSSG
GSSGSETPGTSESATPESSGGSSGGSDKKYSIGLAIGTNSVGWAVITDEYKVPSKKFKVLG
NTDRHSIKKNLIGALLFDSGETAEATRLKRTARRRYTRRKNRICYLQEIFSNEMAKVDDSFF
HRLEESFLVEEDKKHERHPIFGNIVDEVAYHEKYPTIYHLRKKLVDSTDKADLRLIYLALAH
MIKFRGHFLIEGDLNPDNSDVDKLFIQLVQTYNQLFEENPINASGVDAKAILSARLSKSRRL
ENLIAQLPGEKKNGLFGNLIALSLGLTPNFKSNFDLAEDAKLQLSKDTYDDDLDNLLAQIG
DQYADLFLAAKNLSDAILLSDILRVNTEITKAPLSASMIKRYDEHHQDLTLLKALVRQQLPE
KYKEIFFDQSKNGYAGYIDGGASQEEFYKFIKPILEKMDGTEELLVKLNREDLLRKQRTFD
NGSIPHQIHLGELHAILRRQEDFYPFLKDNREKIEKILTFRIPYYVGPLARGNSRFAWMTRK
SEETITPWNFEEVVDKGASAQSFIERMTNFDKNLPNEKVLPKHSLLYEYFTVYNELTKVKY
VTEGMRKPAFLSGEQKKAIVDLLFKTNRKVTVKQLKEDYFKKIECFDSVEISGVEDRFNAS
LGTYHDLLKIIKDKDFLDNEENEDILEDIVLTLTLFEDREMIEERLKTYAHLFDDKVMKQL
KRRRYTGWGRLSRKLINGIRDKQSGKTILDFLKSDGFANRNFMQLIHDDSLTFKEDIQKA
QVSGQGDSLHEHIANLAGSPAIKKGILQTVKVVDELVKVMGRHKPENIVIEMARENQTTQ
KGQKNSRERMKRIEEGIKELGSQILKEHPVENTQLQNEKLYLYYLQNGRDMYVDQELDIN
RLSDYDVDHIVPQSFLKDDSIDNKVLTRSDKNRGKSDNVPSEEVVKKMKNYWRQLLNAKL
ITQRKFDNLTKAERGGLSELDKAGFIKRQLVETRQITKHVAQILDSRMNTKYDENDKLIRE
VKVITLKSKLVSDFRKDFQFYKVREINNYHHAHDAYLNAVVGTALIKKYPKLESEFVYGDY
KVYDVRKMIAKSEQEIGKATAKYFFYSNIMNFFKTEITLANGEIRKRPLIETNGETGEIVWD
KGRDFATVRKVLSMPQVNIVKKTEVQTGGFSKESILPKRNSDKLIARKKDWDPKKYGGFD
SPTVAYSVLVVAKVEKGKSKKLKSVKELLGITIMERSSFEKNPIDFLEAKGYKEVKKDLIIKL
PKYSLFELENGRKRMLASAGELQKGNELALPSKYVNFLYLASHYEKLKGSPEDNEQKQLF
VEQHKHYLDEIIEQISEFSKRVILADANLDKVLSAYNKHRDKPIREQAENIIHLFTLTNLGAP
AAFKYFDTTIDRKRYTSTKEVLDATLIHQSITGLYETRIDLSQLGGDSGGSGGSGGSTNLS
DIIEKETGKQLVIQESILMLPEEVEEVIGNKPESDILVHTAYDESTDENVMLLTSDAPE
YKPWALVIQDSNGENKIKMLSGGSGGSGGSTNLSDIIEKETGKQLVIQESILMLPEEV
EEVIGNKPESDILVHTAYDESTDENVMLLTSDAPEYKPWALVIQDSNGENKIKMLSG
GSKRTADGSEFEPKKKRKV
APOBEC3B (A3B)-BE4
(SEQ ID NO: 231)
MKRTADGSEFESPKKKRKVNPQIRNPMERMYRDTFYDNFENEPILYGRSYTWLCYE
VKIKRGRSNLLWDTGVFRGQVYFKPQYHAEMCFLSWFCGNQLPAYKCFQITWFVS
WTPCPDCVAKLAEFLSEHPNVTLTISAARLYYYWERDYRRALCRLSQAGARVTIMD
YEEFAYCWENFVYNEGQQFMPWYKFDENYAFLHRTLKEILRYLMDPDTFTFNFNND
PLVLRRRQTYLCYEVERLDNGTWVLMDQHMGFLCNEAKNLLCGFYGRHAELRFLD
LVPSLQLDPAQIYRVTWFISWSPCFSWGCAGEVRAFLQENTHVRLRIFAARIYDYDPL
YKEALQMLRDAGAQVSIMTYDEFEYCWDTFVYRQGCPFQPWDGLEEHSQALSGRL
RAILQNQGNSGGSSGGSSGSETPGTSESATPESSGGSSGGSDKKYSIGLAIGTNSVGWAV
ITDEYKVPSKKFKVLGNTDRHSIKKNLIGALLFDSGETAEATRLKRTARRRYTRRKNRICYL
QEIFSNEMAKVDDSFFHRLEESFLVEEDKKHERHPIFGNIVDEVAYHEKYPTIYHLRKKLV
DSTDKADLRLIYLALAHMIKFRGHFLIEGDLNPDNSDVDKLFIQLVQTYNQLFEENPINAS
GVDAKAILSARLSKSRRLENLIAQLPGEKKNGLFGNLIALSLGLTPNFKSNFDLAEDAKLQL
SKDTYDDDLDNLLAQIGDQYADLFLAAKNLSDAILLSDILRVNTEITKAPLSASMIKRYDEH
HQDLTLLKALVRQQLPEKYKEIFFDQSKNGYAGYIDGGASQEEFYKFIKPILEKMDGTEEL
LVKLNREDLLRKQRTFDNGSIPHQIHLGELHAILRRQEDFYPFLKDNREKIEKILTFRIPYY
VGPLARGNSRFAWMTRKSEETITPWNFEEVVDKGASAQSFIERMTNFDKNLPNEKVLPKH
SLLYEYFTVYNELTKVKYVTEGMRKPAFLSGEQKKAIVDLLFKTNRKVTVKQLKEDYFKKI
ECFDSVEISGVEDRFNASLGTYHDLLKIIKDKDFLDNEENEDILEDIVLTLTLFEDREMIEE
RLKTYAHLFDDKVMKQLKRRRYTGWGRLSRKLINGIRDKQSGKTILDFLKSDGFANRNFM
QLIHDDSLTFKEDIQKAQVSGQGDSLHEHIANLAGSPAIKKGILQTVKVVDELVKVMGRH
KPENIVIEMARENQTTQKGQKNSRERMKRIEEGIKELGSQILKEHPVENTQLQNEKLYLYY
LQNGRDMYVDQELDINRLSDYDVDHIVPQSFLKDDSIDNKVLTRSDKNRGKSDNVPSEEV
VKKMKNYWRQLLNAKLITQRKFDNLTKAERGGLSELDKAGFIKRQLVETRQITKHVAQIL
DSRMNTKYDENDKLIREVKVITLKSKLVSDFRKDFQFYKVREINNYHHAHDAYLNAVVGT
ALIKKYPKLESEFVYGDYKVYDVRKMIAKSEQEIGKATAKYFFYSNIMNFFKTEITLANGEI
RKRPLIETNGETGEIVWDKGRDFATVRKVLSMPQVNIVKKTEVQTGGFSKESILPKRNSDK
LIARKKDWDPKKYGGFDSPTVAYSVLVVAKVEKGKSKKLKSVKELLGITIMERSSFEKNPI
DFLEAKGYKEVKKDLIIKLPKYSLFELENGRKRMLASAGELQKGNELALPSKYVNFLYLAS
HYEKLKGSPEDNEQKQLFVEQHKHYLDEIIEQISEFSKRVILADANLDKVLSAYNKHRDKP
IREQAENIIHLFTLTNLGAPAAFKYFDTTIDRKRYTSTKEVLDATLIHQSITGLYETRIDLSQL
GGDSGGSGGSGGSTNLSDIIEKETGKQLVIQESILMLPEEVEEVIGNKPESDILVHTAY
DESTDENVMLLTSDAPEYKPWALVIQDSNGENKIKMLSGGSGGSGGSTNLSDIIEKET
GKQLVIQESILMLPEEVEEVIGNKPESDILVHTAYDESTDENVMLLTSDAPEYKPWAL
VIQDSNGENKIKMLSGGSKRTADGSEFEPKKKRKV
APOBEC3G (A3G)-BE4
(SEQ ID NO: 232)
MKRTADGSEFESPKKKRKVKPHFRNTVERMYRDTFSYNFYNRPILSRRNTVWLCYE
VKTKGPSRPPLDAKIFRGQVYSELKYHPEMRFFHWFSKWRKLHRDQEYEVTWYISW
SPCTKCTRDMATFLAEDPKVTLTIFVARLYYFWDPDYQEALRSLCQKRDGPRATMKI
MNYDEFQHCWSKFVYSQRELFEPWNNLPKYYILLHIMLGEILRHSMDPPTFTFNFNN
EPWVRGRHETYLCYEVERMHNDTWVLLNQRRGFLCNQAPHKHGFLEGRHAELCFL
DVIPFWKLDLDQDYRVTCFTSWSPCFSCAQEMAKFISKNKHVSLCIFTARIYDDQGR
CQEGLRTLAEAGAKISIMTYSEFKHCWDTFVDHQGCPFQPWDGLDEHSQDLSGRLR
AILQNQENSGGSSGGSSGSETPGTSESATPESSGGSSGGSDKKYSIGLAIGTNSVGWAVIT
DEYKVPSKKFKVLGNTDRHSIKKNLIGALLFDSGETAEATRLKRTARRRYTRRKNRICYLQE
IFSNEMAKVDDSFFHRLEESFLVEEDKKHERHPIFGNIVDEVAYHEKYPTIYHLRKKLYDS
TDKADLRLIYLALAHMIKFRGHFLIEGDLNPDNSDVDKLFIQLVQTYNQLFEENPINASGV
DAKAILSARLSKSRRLENLIAQLPGEKKNGLFGNLIALSLGLTPNFKSNFDLAEDAKLQLSK
DTYDDDLDNLLAQIGDQYADLFLAAKNLSDAILLSDILRVNTEITKAPLSASMIKRYDEHHQ
DLTLLKALVRQQLPEKYKEIFFDQSKNGYAGYIDGGASQEEFYKFIKPILEKMDGTEELLV
KLNREDLLRKQRTFDNGSIPHQIHLGELHAILRRQEDFYPFLKDNREKIEKILTFRIPYYVG
PLARGNSRFAWMTRKSEETITPWNFEEVVDKGASAQSFIERMTNFDKNLPNEKVLPKHSL
LYEYFTVYNELTKVKYVTEGMRKPAFLSGEQKKAIVDLLFKTNRKVTVKQLKEDYFKKIEC
FDSVEISGVEDRFNASLGTYHDLLKIIKDKDFLDNEENEDILEDIVLTLTLFEDREMIEERL
KTYAHLFDDKVMKQLKRRRYTGWGRLSRKLINGIRDKQSGKTILDFLKSDGFANRNFMQ
LIHDDSLTFKEDIQKAQVSGQGDSLHEHIANLAGSPAIKKGILQTVKVVDELVKVMGRHK
PENIVIEMARENQTTQKGQKNSRERMKRIEEGIKELGSQILKEHPVENTQLQNEKLYLYYL
QNGRDMYVDQELDINRLSDYDVDHIVPQSFLKDDSIDNKVLTRSDKNRGKSDNVPSEEVV
KKMKNYWRQLLNAKLITQRKFDNLTKAERGGLSELDKAGFIKRQLVETRQITKHVAQILD
SRMNTKYDENDKLIREVKVITLKSKLVSDFRKDFQFYKVREINNYHHAHDAYLNAVVGTAL
IKKYPKLESEFVYGDYKVYDVRKMIAKSEQEIGKATAKYFFYSNIMNFFKTEITLANGEIRK
RPLIETNGETGEIVWDKGRDFATVRKVLSMPQVNIVKKTEVQTGGFSKESILPKRNSDKLI
ARKKDWDPKKYGGFDSPTVAYSVLVVAKVEKGKSKKLKSVKELLGITIMERSSFEKNPIDF
LEAKGYKEVKKDLIIKLPKYSLFELENGRKRMLASAGELQKGNELALPSKYVNFLYLASHY
EKLKGSPEDNEQKQLFVEQHKHYLDEIIEQISEFSKRVILADANLDKVLSAYNKHRDKPIR
EQAENIIHLFTLTNLGAPAAFKYFDTTIDRKRYTSTKEVLDATLIHQSITGLYETRIDLSQLG
GDSGGSGGSGGSTNLSDIIEKETGKQLVIQESILMLPEEVEEVIGNKPESDILVHTAYD
ESTDENVMLLTSDAPEYKPWALVIQDSNGENKIKMLSGGSGGSGGSTNLSDIIEKETG
KQLVIQESILMLPEEVEEVIGNKPESDILVHTAYDESTDENVMLLTSDAPEYKPWALV
IQDSNGENKIKMLSGGSKRTADGSEFEPKKKRKV
AID-BE4
(SEQ ID NO: 233)
MKRTADGSEFESPKKKRKVDSLLMNRRKFLYQFKNVRWAKGRRETYLCYVVKRRD
SATSFSLDFGYLRNKNGCHVELLFLRYISDWDLDPGRCYRVTWFTSWSPCYDCARH
VADFLRGNPNLSLRIFTARLYFCEDRKAEPEGLRRLHRAGVQIAIMTFKDYFYCWNT
FVENHERTFKAWEGLHENSVRLSRQLRRILLPLYEVDDLRDAFRTLGLSGGSSGGSS
GSETPGTSESATPESSGGSSGGSDKKYSIGLAIGTNSVGWAVITDEYKVPSKKFKVLGNTD
RHSIKKNLIGALLFDSGETAEATRLKRTARRRYTRRKNRICYLQEIFSNEMAKVDDSFFHRL
EESFLVEEDKKHERHPIFGNIVDEVAYHEKYPTIYHLRKKLVDSTDKADLRLIYLALAHMIK
FRGHFLIEGDLNPDNSDVDKLFIQLVQTYNQLFEENPINASGVDAKAILSARLSKSRRLENL
IAQLPGEKKNGLFGNLIALSLGLTPNFKSNFDLAEDAKLQLSKDTYDDDLDNLLAQIGDQ
YADLFLAAKNLSDAILLSDILRVNTEITKAPLSASMIKRYDEHHQDLTLLKALVRQQLPEKY
KEIFFDQSKNGYAGYIDGGASQEEFYKFIKPILEKMDGTEELLVKLNREDLLRKQRTFDN
GSIPHQIHLGELHAILRRQEDFYPFLKDNREKIEKILTFRIPYYVGPLARGNSRFAWMTRKS
EETITPWNFEEVVDKGASAQSFIERMTNFDKNLPNEKVLPKHSLLYEYFTVYNELTKVKYV
TEGMRKPAFLSGEQKKAIVDLLFKTNRKVTVKQLKEDYFKKIECFDSVEISGVEDRFNASL
GTYHDLLKIIKDKDFLDNEENEDILEDIVLTLTLFEDREMIEERLKTYAHLFDDKVMKQLK
RRRYTGWGRLSRKLINGIRDKQSGKTILDFLKSDGFANRNFMQLIHDDSLTFKEDIQKAQ
VSGQGDSLHEHIANLAGSPAIKKGILQTVKVVDELVKVMGRHKPENIVIEMARENQTTQK
GQKNSRERMKRIEEGIKELGSQILKEHPVENTQLQNEKLYLYYLQNGRDMYVDQELDINR
LSDYDVDHIVPQSFLKDDSIDNKVLTRSDKNRGKSDNVPSEEVVKKMKNYWRQLLNAKLI
TQRKFDNLTKAERGGLSELDKAGFIKRQLVETRQITKHVAQILDSRMNTKYDENDKLIREV
KVITLKSKLVSDFRKDFQFYKVREINNYHHAHDAYLNAVVGTALIKKYPKLESEFVYGDYK
VYDVRKMIAKSEQEIGKATAKYFFYSNIMNFFKTEITLANGEIRKRPLIETNGETGEIVWDK
GRDFATVRKVLSMPQVNIVKKTEVQTGGFSKESILPKRNSDKLIARKKDWDPKKYGGFDS
PTVAYSVLVVAKVEKGKSKKLKSVKELLGITIMERSSFEKNPIDFLEAKGYKEVKKDLIIKLP
KYSLFELENGRKRMLASAGELQKGNELALPSKYVNFLYLASHYEKLKGSPEDNEQKQLFV
EQHKHYLDEIIEQISEFSKRVILADANLDKVLSAYNKHRDKPIREQAENIIHLFTLTNLGAPA
AFKYFDTTIDRKRYTSTKEVLDATLIHQSITGLYETRIDLSQLGGDSGGSGGSGGSTNLSDI
IEKETGKQLVIQESILMLPEEVEEVIGNKPESDILVHTAYDESTDENVMLLTSDAPEYK
PWALVIQDSNGENKIKMLSGGSGGSGGSTNLSDIIEKETGKQLVIQESILMLPEEVEEV
IGNKPESDILVHTAYDESTDENVMLLTSDAPEYKPWALVIQDSNGENKIKMLSGGSK
RTADGSEFEPKKKRKV
CDA-BE4
(SEQ ID NO: 234)
MKRTADGSEFESPKKKRKVTDAEYVRIHEKLDIYTFKKQFFNNKKSVSHRCYVLFEL
KRRGERRACFWGYAVNKPQSGTERGIHAEIFSIRKVEEYLRDNPGQFTINWYSSWSP
CADCAEKILEWYNQELRGNGHTLKIWACKLYYEKNARNQIGLWNLRDNGVGLNV
MVSEHYQCCRKIFIQSSHNQLNENRWLEKTLKRAEKRRSELSIMIQVKILHTTKSPAV
SGGSSGGSSGSETPGTSESATPESSGGSSGGSDKKYSIGLAIGTNSVGWAVITDEYKVPSK
KFKVLGNTDRHSIKKNLIGALLFDSGETAEATRLKRTARRRYTRRKNRICYLQEIFSNEMAK
VDDSFFHRLEESFLVEEDKKHERHPIFGNIVDEVAYHEKYPTIYHLRKKLVDSTDKADLRL
IYLALAHMIKFRGHFLIEGDLNPDNSDVDKLFIQLVQTYNQLFEENPINASGVDAKAILSAR
LSKSRRLENLIAQLPGEKKNGLFGNLIALSLGLTPNFKSNFDLAEDAKLQLSKDTYDDDLD
NLLAQIGDQYADLFLAAKNLSDAILLSDILRVNTEITKAPLSASMIKRYDEHHQDLTLLKAL
VRQQLPEKYKEIFFDQSKNGYAGYIDGGASQEEFYKFIKPILEKMDGTEELLVKLNREDLL
RKQRTFDNGSIPHQIHLGELHAILRRQEDFYPFLKDNREKIEKILTFRIPYYVGPLARGNSR
FAWMTRKSEETITPWNFEEVVDKGASAQSFIERMTNFDKNLPNEKVLPKHSLLYEYFTVY
NELTKVKYVTEGMRKPAFLSGEQKKAIVDLLFKTNRKVTVKQLKEDYFKKIECFDSVEISG
VEDRFNASLGTYHDLLKIIKDKDFLDNEENEDILEDIVLTLTLFEDREMIEERLKTYAHLFD
DKVMKQLKRRRYTGWGRLSRKLINGIRDKQSGKTILDFLKSDGFANRNFMQLIHDDSLTF
KEDIQKAQVSGQGDSLHEHIANLAGSPAIKKGILQTVKVVDELVKVMGRHKPENIVIEMAR
ENQTTQKGQKNSRERMKRIEEGIKELGSQILKEHPVENTQLQNEKLYLYYLQNGRDMYVD
QELDINRLSDYDVDHIVPQSFLKDDSIDNKVLTRSDKNRGKSDNVPSEEVVKKMKNYWRQ
LLNAKLITQRKFDNLTKAERGGLSELDKAGFIKRQLVETRQITKHVAQILDSRMNTKYDEN
DKLIREVKVITLKSKLVSDFRKDFQFYKVREINNYHHAHDAYLNAVVGTALIKKYPKLESEF
VYGDYKVYDVRKMIAKSEQEIGKATAKYFFYSNIMNFFKTEITLANGEIRKRPLIETNGETG
EIVWDKGRDFATVRKVLSMPQVNIVKKTEVQTGGFSKESILPKRNSDKLIARKKDWDPKK
YGGFDSPTVAYSVLVVAKVEKGKSKKLKSVKELLGITIMERSSFEKNPIDFLEAKGYKEVKK
DLIIKLPKYSLFELENGRKRMLASAGELQKGNELALPSKYVNFLYLASHYEKLKGSPEDNE
QKQLFVEQHKHYLDEIIEQISEFSKRVILADANLDKVLSAYNKHRDKPIREQAENIIHLFTLT
NLGAPAAFKYFDTTIDRKRYTSTKEVLDATLIHQSITGLYETRIDLSQLGGDSGGSGGSGGS
TNLSDIIEKETGKQLVIQESILMLPEEVEEVIGNKPESDILVHTAYDESTDENVMLLTS
DAPEYKPWALVIQDSNGENKIKMLSGGSGGSGGSTNLSDIIEKETGKQLVIQESILML
PEEVEEVIGNKPESDILVHTAYDESTDENVMLLTSDAPEYKPWALVIQDSNGENKIK
MLSGGSKRTADGSEFEPKKKRKV
FERNY-BE4
(SEQ ID NO: 235)
MKRTADGSEFESPKKKRKVFERNYDPRELRKETYLLYEIKWGKSGKLWRHWCQNN
RTQHAEVYFLENIFNARRFNPSTHCSITWYLSWSPCAECSQKIVDFLKEHPNVNLEIY
VARLYYHEDERNRQGLRDLVNSGVTIRIMDLPDYNYCWKTFVSDQGGDEDYWPGH
FAPWIKQYSLKLSGGSSGGSSGSETPGTSESATPESSGGSSGGSDKKYSIGLAIGTNSVG
WAVITDEYKVPSKKFKVLGNTDRHSIKKNLIGALLFDSGETAEATRLKRTARRRYTRRKNRI
CYLQEIFSNEMAKVDDSFFHRLEESFLVEEDKKHERHPIFGNIVDEVAYHEKYPTIYHLRK
KLVDSTDKADLRLIYLALAHMIKFRGHFLIEGDLNPDNSDVDKLFIQLVQTYNQLFEENPI
NASGVDAKAILSARLSKSRRLENLIAQLPGEKKNGLFGNLIALSLGLTPNFKSNFDLAEDAK
LQLSKDTYDDDLDNLLAQIGDQYADLFLAAKNLSDAILLSDILRVNTEITKAPLSASMIKRY
DEHHQDLTLLKALVRQQLPEKYKEIFFDQSKNGYAGYIDGGASQEEFYKFIKPILEKMDG
TEELLVKLNREDLLRKQRTFDNGSIPHQIHLGELHAILRRQEDFYPFLKDNREKIEKILTFR
IPYYVGPLARGNSRFAWMTRKSEETITPWNFEEVVDKGASAQSFIERMTNFDKNLPNEKVL
PKHSLLYEYFTVYNELTKVKYVTEGMRKPAFLSGEQKKAIVDLLFKTNRKVTVKQLKEDYF
KKIECFDSVEISGVEDRFNASLGTYHDLLKIIKDKDFLDNEENEDILEDIVLTLTLFEDREM
IEERLKTYAHLFDDKVMKQLKRRRYTGWGRLSRKLINGIRDKQSGKTILDFLKSDGFANR
NFMQLIHDDSLTFKEDIQKAQVSGQGDSLHEHIANLAGSPAIKKGILQTVKVVDELVKVM
GRHKPENIVIEMARENQTTQKGQKNSRERMKRIEEGIKELGSQILKEHPVENTQLQNEKL
YLYYLQNGRDMYVDQELDINRLSDYDVDHIVPQSFLKDDSIDNKVLTRSDKNRGKSDNVP
SEEVVKKMKNYWRQLLNAKLITQRKFDNLTKAERGGLSELDKAGFIKRQLVETRQITKHV
AQILDSRMNTKYDENDKLIREVKVITLKSKLVSDFRKDFQFYKVREINNYHHAHDAYLNAV
VGTALIKKYPKLESEFVYGDYKVYDVRKMIAKSEQEIGKATAKYFFYSNIMNFFKTEITLAN
GEIRKRPLIETNGETGEIVWDKGRDFATVRKVLSMPQVNIVKKTEVQTGGFSKESILPKRN
SDKLIARKKDWDPKKYGGFDSPTVAYSVLVVAKVEKGKSKKLKSVKELLGITIMERSSFEK
NPIDFLEAKGYKEVKKDLIIKLPKYSLFELENGRKRMLASAGELQKGNELALPSKYVNFLY
LASHYEKLKGSPEDNEQKQLFVEQHKHYLDEIIEQISEFSKRVILADANLDKVLSAYNKHR
DKPIREQAENIIHLFTLTNLGAPAAFKYFDTTIDRKRYTSTKEVLDATLIHQSITGLYETRIDL
SQLGGDSGGSGGSGGSTNLSDIIEKETGKQLVIQESILMLPEEVEEVIGNKPESDILVHT
AYDESTDENVMLLTSDAPEYKPWALVIQDSNGENKIKMLSGGSGGSGGSTNLSDIIE
KETGKQLVIQESILMLPEEVEEVIGNKPESDILVHTAYDESTDENVMLLTSDAPEYKP
WALVIQDSNGENKIKMLSGGSKRTADGSEFEPKKKRKV
Evolved APOBEC3A (eA3A)-BE4
(SEQ ID NO: 236)
MKRTADGSEFESPKKKRKVEASPASGPRHLMDPHIFTSNFNNGIGRHKTYLCYEVER
LDNGTSVKMDQHRGFLHGQAKNLLCGFYGRHAELRFLDLVPSLQLDPAQIYRVTWF
ISWSPCFSWGCAGEVRAFLQENTHVRLRIFAARIYDYDPLYKEALQMLRDAGAQVSI
MTYDEFKHCWDTFVDHQGCPFQPWDGLDEHSQALSGRLRAILQNQGNSGGSSGGSS
GSETPGTSESATPESSGGSSGGSDKKYSIGLAIGTNSVGWAVITDEYKVPSKKFKVLGNTD
RHSIKKNLIGALLFDSGETAEATRLKRTARRRYTRRKNRICYLQEIFSNEMAKVDDSFFHRL
EESFLVEEDKKHERHPIFGNIVDEVAYHEKYPTIYHLRKKLVDSTDKADLRLIYLALAHMIK
FRGHFLIEGDLNPDNSDVDKLFIQLVQTYNQLFEENPINASGVDAKAILSARLSKSRRLENL
IAQLPGEKKNGLFGNLIALSLGLTPNFKSNFDLAEDAKLQLSKDTYDDDLDNLLAQIGDQ
YADLFLAAKNLSDAILLSDILRVNTEITKAPLSASMIKRYDEHHQDLTLLKALVRQQLPEKY
KEIFFDQSKNGYAGYIDGGASQEEFYKFIKPILEKMDGTEELLVKLNREDLLRKQRTFDN
GSIPHQIHLGELHAILRRQEDFYPFLKDNREKIEKILTFRIPYYVGPLARGNSRFAWMTRKS
EETITPWNFEEVVDKGASAQSFIERMTNFDKNLPNEKVLPKHSLLYEYFTVYNELTKVKYV
TEGMRKPAFLSGEQKKAIVDLLFKTNRKVTVKQLKEDYFKKIECFDSVEISGVEDRFNASL
GTYHDLLKIIKDKDFLDNEENEDILEDIVLTLTLFEDREMIEERLKTYAHLFDDKVMKQLK
RRRYTGWGRLSRKLINGIRDKQSGKTILDFLKSDGFANRNFMQLIHDDSLTFKEDIQKAQ
VSGQGDSLHEHIANLAGSPAIKKGILQTVKVVDELVKVMGRHKPENIVIEMARENQTTQK
GQKNSRERMKRIEEGIKELGSQILKEHPVENTQLQNEKLYLYYLQNGRDMYVDQELDINR
LSDYDVDHIVPQSFLKDDSIDNKVLTRSDKNRGKSDNVPSEEVVKKMKNYWRQLLNAKLI
TQRKFDNLTKAERGGLSELDKAGFIKRQLVETRQITKHVAQILDSRMNTKYDENDKLIREV
KVITLKSKLVSDFRKDFQFYKVREINNYHHAHDAYLNAVVGTALIKKYPKLESEFVYGDYK
VYDVRKMIAKSEQEIGKATAKYFFYSNIMNFFKTEITLANGEIRKRPLIETNGETGEIVWDK
GRDFATVRKVLSMPQVNIVKKTEVQTGGFSKESILPKRNSDKLIARKKDWDPKKYGGFDS
PTVAYSVLVVAKVEKGKSKKLKSVKELLGITIMERSSFEKNPIDFLEAKGYKEVKKDLIIKLP
KYSLFELENGRKRMLASAGELQKGNELALPSKYVNFLYLASHYEKLKGSPEDNEQKQLFV
EQHKHYLDEIIEQISEFSKRVILADANLDKVLSAYNKHRDKPIREQAENIIHLFTLTNLGAPA
AFKYFDTTIDRKRYTSTKEVLDATLIHQSITGLYETRIDLSQLGGDSGGSGGSGGSTNESDI
IEKETGKQLVIQESILMLPEEVEEVIGNKPESDILVHTAYDESTDENVMLLTSDAPEYK
PWALVIQDSNGENKIKMLSGGSGGSGGSTNLSDIIEKETGKQLVIQESILMLPEEVEEV
IGNKPESDILVHTAYDESTDENVMLLTSDAPEYKPWALVIQDSNGENKIKMLSGGSK
RTADGSEFEPKKKRKV
AALN-BE4
(SEQ ID NO: 237)
MKRTADGSEFESPKKKRKVSSETGPVAVDPTLRRRIEPHEFEVFFDPRELAAETCLLY
EINWGGRHSIWRHTSQNTNKHVEVNFIEKFTTERYFCPNTRCSITWFLSWSPCGECSR
AITEFLSRYPHVTLFIYIARLYHLANPRNRQGLRDLISSGVTIQIMTEQESGYCWRNFV
NYSPSNEAHWPRYPHLWVRLYVLELYCIILGLPPCLNILRRKQPQLTFFTIALQSCHY
QRLPPHILWATGLKSGGSSGGSSGSETPGTSESATPESSGGSSGGSDKKYSIGLAIGTNS
VGWAVITDEYKVPSKKFKVLGNTDRHSIKKNLIGALLFDSGETAEATRLKRTARRRYTRRK
NRICYLQEIFSNEMAKVDDSFFHRLEESFLVEEDKKHERHPIFGNIVDEVAYHEKYPTIYHL
RKKLVDSTDKADLRLIYLALAHMIKFRGHFLIEGDLNPDNSDVDKLFIQLVQTYNQLFEEN
PINASGVDAKAILSARLSKSRRLENLIAQLPGEKKNGLFGNLIALSLGLTPNFKSNFDLAED
AKLQLSKDTYDDDLDNLLAQIGDQYADLFLAAKNLSDAILLSDILRVNTEITKAPLSASMIK
RYDEHHQDLTLLKALVRQQLPEKYKEIFFDQSKNGYAGYIDGGASQEEFYKFIKPILEKM
DGTEELLVKLNREDLLRKQRTFDNGSIPHQIHLGELHAILRRQEDFYPFLKDNREKIEKIL
TFRIPYYVGPLARGNSRFAWMTRKSEETITPWNFEEVVDKGASAQSFIERMTNFDKNLPNE
KVLPKHSLLYEYFTVYNELTKVKYVTEGMRKPAFLSGEQKKAIVDLLFKTNRKVTVKQLKE
DYFKKIECFDSVEISGVEDRFNASLGTYHDLLKIIKDKDFLDNEENEDILEDIVLTLTLFED
REMIEERLKTYAHLFDDKVMKQLKRRRYTGWGRLSRKLINGIRDKQSGKTILDFLKSDGF
ANRNFMQLIHDDSLTFKEDIQKAQVSGQGDSLHEHIANLAGSPAIKKGILQTVKVVDELV
KVMGRHKPENIVIEMARENQTTQKGQKNSRERMKRIEEGIKELGSQILKEHPVENTQLQN
EKLYLYYLQNGRDMYVDQELDINRLSDYDVDHIVPQSFLKDDSIDNKVLTRSDKNRGKSD
NVPSEEVVKKMKNYWRQLLNAKLITQRKFDNLTKAERGGLSELDKAGFIKRQLVETRQIT
KHVAQILDSRMNTKYDENDKLIREVKVITLKSKLVSDFRKDFQFYKVREINNYHHAHDAYL
NAVVGTALIKKYPKLESEFVYGDYKVYDVRKMIAKSEQEIGKATAKYFFYSNIMNFFKTEIT
LANGEIRKRPLIETNGETGEIVWDKGRDFATVRKVLSMPQVNIVKKTEVQTGGFSKESILP
KRNSDKLIARKKDWDPKKYGGFDSPTVAYSVLVVAKVEKGKSKKLKSVKELLGITIMERSS
FEKNPIDFLEAKGYKEVKKDLIIKLPKYSLFELENGRKRMLASAGELQKGNELALPSKYVN
FLYLASHYEKLKGSPEDNEQKQLFVEQHKHYLDEIIEQISEFSKRVILADANLDKVLSAYNK
HRDKPIREQAENIIHLFTLTNLGAPAAFKYFDTTIDRKRYTSTKEVLDATLIHQSITGLYETRI
DLSQLGGDSGGSGGSGGSTNLSDIIEKETGKQLVIQESILMLPEEVEEVIGNKPESDILV
HTAYDESTDENVMLLTSDAPEYKPWALVIQDSNGENKIKMLSGGSGGSGGSTNLSDI
IEKETGKQLVIQESILMLPEEVEEVIGNKPESDILVHTAYDESTDENVMLLTSDAPEYK
PWALVIQDSNGENKIKMLSGGSKRTADGSEFEPKKKRKV
BE4max, modified with SpCas9-NG
(SEQ ID NO: 238)
MKRTADGSEFESPKKKRKVSSETGPVAVDPTLRRRIEPHEFEVFFDPRELRKETCLLY
EINWGGRHSIWRHTSQNTNKHVEVNFIEKFTTERYFCPNTRCSITWFLSWSPCGECSR
AITEFLSRYPHVTLFIYIARLYHHADPRNRQGLRDLISSGVTIQIMTEQESGYCWRNFV
NYSPSNEAHWPRYPHLWVRLYVLELYCIILGLPPCLNILRRKQPQLTFFTIALQSCHY
QRLPPHILWATGLKSGGSSGGSSGSETPGTSESATPESSGGSSGGSDKKYSIGLAIGTNS
VGWAVITDEYKVPSKKFKVLGNTDRHSIKKNLIGALLFDSGETAEATRLKRTARRRYTRRK
NRICYLQEIFSNEMAKVDDSFFHRLEESFLVEEDKKHERHPIFGNIVDEVAYHEKYPTIYHL
RKKLVDSTDKADLRLIYLALAHMIKFRGHFLIEGDLNPDNSDVDKLFIQLVQTYNQLFEEN
PINASGVDAKAILSARLSKSRRLENLIAQLPGEKKNGLFGNLIALSLGLTPNFKSNFDLAED
AKLQLSKDTYDDDLDNLLAQIGDQYADLFLAAKNLSDAILLSDILRVNTEITKAPLSASMIK
RYDEHHQDLTLLKALVRQQLPEKYKEIFFDQSKNGYAGYIDGGASQEEFYKFIKPILEKM
DGTEELLVKLNREDLLRKQRTFDNGSIPHQIHLGELHAILRRQEDFYPFLKDNREKIEKIL
TFRIPYYVGPLARGNSRFAWMTRKSEETITPWNFEEVVDKGASAQSFIERMTNFDKNLPNE
KVLPKHSLLYEYFTVYNELTKVKYVTEGMRKPAFLSGEQKKAIVDLLFKTNRKVTVKQLKE
DYFKKIECFDSVEISGVEDRFNASLGTYHDLLKIIKDKDFLDNEENEDILEDIVLTLTLFED
REMIEERLKTYAHLFDDKVMKQLKRRRYTGWGRLSRKLINGIRDKQSGKTILDFLKSDGF
ANRNFMQLIHDDSLTFKEDIQKAQVSGQGDSLHEHIANLAGSPAIKKGILQTVKVVDELV
KVMGRHKPENIVIEMARENQTTQKGQKNSRERMKRIEEGIKELGSQILKEHPVENTQLQN
EKLYLYYLQNGRDMYVDQELDINRLSDYDVDHIVPQSFLKDDSIDNKVLTRSDKNRGKSD
NVPSEEVVKKMKNYWRQLLNAKLITQRKFDNLTKAERGGLSELDKAGFIKRQLVETRQIT
KHVAQILDSRMNTKYDENDKLIREVKVITLKSKLVSDFRKDFQFYKVREINNYHHAHDAYL
NAVVGTALIKKYPKLESEFVYGDYKVYDVRKMIAKSEQEIGKATAKYFFYSNIMNFFKTEIT
LANGEIRKRPLIETNGETGEIVWDKGRDFATVRKVLSMPQVNIVKKTEVQTGGFSKESIRP
KRNSDKLIARKKDWDPKKYGGFVSPTVAYSVLVVAKVEKGKSKKLKSVKELLGITIMERSS
FEKNPIDFLEAKGYKEVKKDLIIKLPKYSLFELENGRKRMLASARFLQKGNELALPSKYVN
FLYLASHYEKLKGSPEDNEQKQLFVEQHKHYLDEIIEQISEFSKRVILADANLDKVLSAYNK
HRDKPIREQAENIIHLFTLTNLGAPRAFKYFDTTIDRKVYRSTKEVLDATLIHQSITGLYETRI
DLSQLGGDSGGSGGSGGSTNLSDIIEKETGKQLVIQESILMLPEEVEEVIGNKPESDILV
HTAYDESTDENVMLLTSDAPEYKPWALVIQDSNGENKIKMLSGGSGGSGGSTNLSDI
IEKETGKQLVIQESILMLPEEVEEVIGNKPESDILVHTAYDESTDENVMLLTSDAPEYK
PWALVIQDSNGENKIKMLSGGSKRTADGSEFEPKKKRKV
YE1-SpCas9-NG base editor (YE1-NG)
(SEQ ID NO: 239)
MKRTADGSEFESPKKKRKVSSETGPVAVDPTLRRRIEPHEFEVFFDPRELRKETCLLY
EINWGGRHSIWRHTSQNTNKHVEVNFIEKFTTERYFCPNTRCSITWFLSYSPCGECSR
AITEFLSRYPHVTLFIYIARLYHHADPENRQGLRDLISSGVTIQIMTEQESGYCWRNFV
NYSPSNEAHWPRYPHLWVRLYVLELYCIILGLPPCLNILRRKQPQLTFFTIALQSCHY
QRLPPHILWATGLKSGGSSGGSSGSETPGTSESATPESSGGSSGGSDKKYSIGLAIGTNS
VGWAVITDEYKVPSKKFKVLGNTDRHSIKKNLIGALLFDSGETAEATRLKRTARRRYTRRK
NRICYLQEIFSNEMAKVDDSFFHRLEESFLVEEDKKHERHPIFGNIVDEVAYHEKYPTIYHL
RKKLVDSTDKADLRLIYLALAHMIKFRGHFLIEGDLNPDNSDVDKLFIQLVQTYNQLFEEN
PINASGVDAKAILSARLSKSRRLENLIAQLPGEKKNGLFGNLIALSLGLTPNFKSNFDLAED
AKLQLSKDTYDDDLDNLLAQIGDQYADLFLAAKNLSDAILLSDILRVNTEITKAPLSASMIK
RYDEHHQDLTLLKALVRQQLPEKYKEIFFDQSKNGYAGYIDGGASQEEFYKFIKPILEKM
DGTEELLVKLNREDLLRKQRTFDNGSIPHQIHLGELHAILRRQEDFYPFLKDNREKIEKIL
TFRIPYYVGPLARGNSRFAWMTRKSEETITPWNFEEVVDKGASAQSFIERMTNFDKNLPNE
KVLPKHSLLYEYFTVYNELTKVKYVTEGMRKPAFLSGEQKKAIVDLLFKTNRKVTVKQLKE
DYFKKIECFDSVEISGVEDRFNASLGTYHDLLKIIKDKDFLDNEENEDILEDIVLTLTLFED
REMIEERLKTYAHLFDDKVMKQLKRRRYTGWGRLSRKLINGIRDKQSGKTILDFLKSDGF
ANRNFMQLIHDDSLTFKEDIQKAQVSGQGDSLHEHIANLAGSPAIKKGILQTVKVVDELV
KVMGRHKPENIVIEMARENQTTQKGQKNSRERMKRIEEGIKELGSQILKEHPVENTQLQN
EKLYLYYLQNGRDMYVDQELDINRLSDYDVDHIVPQSFLKDDSIDNKVLTRSDKNRGKSD
NVPSEEVVKKMKNYWRQLLNAKLITQRKFDNLTKAERGGLSELDKAGFIKRQLVETRQIT
KHVAQILDSRMNTKYDENDKLIREVKVITLKSKLVSDFRKDFQFYKVREINNYHHAHDAYL
NAVVGTALIKKYPKLESEFVYGDYKVYDVRKMIAKSEQEIGKATAKYFFYSNIMNFFKTEIT
LANGEIRKRPLIETNGETGEIVWDKGRDFATVRKVLSMPQVNIVKKTEVQTGGFSKESIRP
KRNSDKLIARKKDWDPKKYGGFVSPTVAYSVLVVAKVEKGKSKKLKSVKELLGITIMERSS
FEKNPIDFLEAKGYKEVKKDLIIKLPKYSLFELENGRKRMLASARFLQKGNELALPSKYVN
FLYLASHYEKLKGSPEDNEQKQLFVEQHKHYLDEIIEQISEFSKRVILADANLDKVLSAYNK
HRDKPIREQAENIIHLFTLTNLGAPRAFKYFDTTIDRKVYRSTKEVLDATLIHQSITGLYETRI
DLSQLGGDSGGSGGSGGSTNLSDIIEKETGKQLVIQESILMLPEEVEEVIGNKPESDILV
HTAYDESTDENVMLLTSDAPEYKPWALVIQDSNGENKIKMLSGGSGGSGGSTNLSDI
IEKETGKQLVIQESILMLPEEVEEVIGNKPESDILVHTAYDESTDENVMLLTSDAPEYK
PWALVIQDSNGENKIKMLSGGSKRTADGSEFEPKKKRKV
YE2-SpCas9-NG base editor
(SEQ ID NO: 240)
MKRTADGSEFESPKKKRKVSSETGPVAVDPTLRRRIEPHEFEVFFDPRELRKETCLLY
EINWGGRHSIWRHTSQNTNKHVEVNFIEKFTTERYFCPNTRCSITWFLSYSPCGECSR
AITEFLSRYPHVTLFIYIARLYHHADPRNRQGLEDLISSGVTIQIMTEQESGYCWRNFV
NYSPSNEAHWPRYPHLWVRLYVLELYCIILGLPPCLNILRRKQPQLTFFTIALQSCHY
QRLPPHILWATGLKSGGSSGGSSGSETPGTSESATPESSGGSSGGSDKKYSIGLAIGTNS
VGWAVITDEYKVPSKKFKVLGNTDRHSIKKNLIGALLFDSGETAEATRLKRTARRRYTRRK
NRICYLQEIFSNEMAKVDDSFFHRLEESFLVEEDKKHERHPIFGNIVDEVAYHEKYPTIYHL
RKKLVDSTDKADLRLIYLALAHMIKFRGHFLIEGDLNPDNSDVDKLFIQLVQTYNQLFEEN
PINASGVDAKAILSARLSKSRRLENLIAQLPGEKKNGLFGNLIALSLGLTPNFKSNFDLAED
AKLQLSKDTYDDDLDNLLAQIGDQYADLFLAAKNLSDAILLSDILRVNTEITKAPLSASMIK
RYDEHHQDLTLLKALVRQQLPEKYKEIFFDQSKNGYAGYIDGGASQEEFYKFIKPILEKM
DGTEELLVKLNREDLLRKQRTFDNGSIPHQIHLGELHAILRRQEDFYPFLKDNREKIEKIL
TFRIPYYVGPLARGNSRFAWMTRKSEETITPWNFEEVVDKGASAQSFIERMTNFDKNLPNE
KVLPKHSLLYEYFTVYNELTKVKYVTEGMRKPAFLSGEQKKAIVDLLFKTNRKVTVKQLKE
DYFKKIECFDSVEISGVEDRFNASLGTYHDLLKIIKDKDFLDNEENEDILEDIVLTLTLFED
REMIEERLKTYAHLFDDKVMKQLKRRRYTGWGRLSRKLINGIRDKQSGKTILDFLKSDGF
ANRNFMQLIHDDSLTFKEDIQKAQVSGQGDSLHEHIANLAGSPAIKKGILQTVKVVDELV
KVMGRHKPENIVIEMARENQTTQKGQKNSRERMKRIEEGIKELGSQILKEHPVENTQLQN
EKLYLYYLQNGRDMYVDQELDINRLSDYDVDHIVPQSFLKDDSIDNKVLTRSDKNRGKSD
NVPSEEVVKKMKNYWRQLLNAKLITQRKFDNLTKAERGGLSELDKAGFIKRQLVETRQIT
KHVAQILDSRMNTKYDENDKLIREVKVITLKSKLVSDFRKDFQFYKVREINNYHHAHDAYL
NAVVGTALIKKYPKLESEFVYGDYKVYDVRKMIAKSEQEIGKATAKYFFYSNIMNFFKTEIT
LANGEIRKRPLIETNGETGEIVWDKGRDFATVRKVLSMPQVNIVKKTEVQTGGFSKESIRP
KRNSDKLIARKKDWDPKKYGGFVSPTVAYSVLVVAKVEKGKSKKLKSVKELLGITIMERSS
FEKNPIDFLEAKGYKEVKKDLIIKLPKYSLFELENGRKRMLASARFLQKGNELALPSKYVN
FLYLASHYEKLKGSPEDNEQKQLFVEQHKHYLDEIIEQISEFSKRVILADANLDKVLSAYNK
HRDKPIREQAENIIHLFTLTNLGAPRAFKYFDTTIDRKVYRSTKEVLDATLIHQSITGLYETRI
DLSQLGGDSGGSGGSGGSTNLSDIIEKETGKQLVIQESILMLPEEVEEVIGNKPESDILV
HTAYDESTDENVMLLTSDAPEYKPWALVIQDSNGENKIKMLSGGSGGSGGSTNLSDI
IEKETGKQLVIQESILMLPEEVEEVIGNKPESDILVHTAYDESTDENVMLLTSDAPEYK
PWALVIQDSNGENKIKMLSGGSKRTADGSEFEPKKKRKV
YEE-SpCas9-NG base editor
(SEQ ID NO: 241)
MKRTADGSEFESPKKKRKVSSETGPVAVDPTLRRRIEPHEFEVFFDPRELRKETCLLY
EINWGGRHSIWRHTSQNTNKHVEVNFIEKFTTERYFCPNTRCSITWFLSYSPCGECSR
AITEFLSRYPHVTLFIYIARLYHHADPENRQGLEDLISSGVTIQIMTEQESGYCWRNFV
NYSPSNEAHWPRYPHLWVRLYVLELYCIILGLPPCLNILRRKQPQLTFFTIALQSCHY
QRLPPHILWATGLKSGGSSGGSSGSETPGTSESATPESSGGSSGGSDKKYSIGLAIGTNS
VGWAVITDEYKVPSKKFKVLGNTDRHSIKKNLIGALLFDSGETAEATRLKRTARRRYTRRK
NRICYLQEIFSNEMAKVDDSFFHRLEESFLVEEDKKHERHPIFGNIVDEVAYHEKYPTIYHL
RKKLVDSTDKADLRLIYLALAHMIKFRGHFLIEGDLNPDNSDVDKLFIQLVQTYNQLFEEN
PINASGVDAKAILSARLSKSRRLENLIAQLPGEKKNGLFGNLIALSLGLTPNFKSNFDLAED
AKLQLSKDTYDDDLDNLLAQIGDQYADLFLAAKNLSDAILLSDILRVNTEITKAPLSASMIK
RYDEHHQDLTLLKALVRQQLPEKYKEIFFDQSKNGYAGYIDGGASQEEFYKFIKPILEKM
DGTEELLVKLNREDLLRKQRTFDNGSIPHQIHLGELHAILRRQEDFYPFLKDNREKIEKIL
TFRIPYYVGPLARGNSRFAWMTRKSEETITPWNFEEVVDKGASAQSFIERMTNFDKNLPNE
KVLPKHSLLYEYFTVYNELTKVKYVTEGMRKPAFLSGEQKKAIVDLLFKTNRKVTVKQLKE
DYFKKIECFDSVEISGVEDRFNASLGTYHDLLKIIKDKDFLDNEENEDILEDIVLTLTLFED
REMIEERLKTYAHLFDDKVMKQLKRRRYTGWGRLSRKLINGIRDKQSGKTILDFLKSDGF
ANRNFMQLIHDDSLTFKEDIQKAQVSGQGDSLHEHIANLAGSPAIKKGILQTVKVVDELV
KVMGRHKPENIVIEMARENQTTQKGQKNSRERMKRIEEGIKELGSQILKEHPVENTQLQN
EKLYLYYLQNGRDMYVDQELDINRLSDYDVDHIVPQSFLKDDSIDNKVLTRSDKNRGKSD
NVPSEEVVKKMKNYWRQLLNAKLITQRKFDNLTKAERGGLSELDKAGFIKRQLVETRQIT
KHVAQILDSRMNTKYDENDKLIREVKVITLKSKLVSDFRKDFQFYKVREINNYHHAHDAYL
NAVVGTALIKKYPKLESEFVYGDYKVYDVRKMIAKSEQEIGKATAKYFFYSNIMNFFKTEIT
LANGEIRKRPLIETNGETGEIVWDKGRDFATVRKVLSMPQVNIVKKTEVQTGGFSKESIRP
KRNSDKLIARKKDWDPKKYGGFVSPTVAYSVLVVAKVEKGKSKKLKSVKELLGITIMERSS
FEKNPIDFLEAKGYKEVKKDLIIKLPKYSLFELENGRKRMLASARFLQKGNELALPSKYVN
FLYLASHYEKLKGSPEDNEQKQLFVEQHKHYLDEIIEQISEFSKRVILADANLDKVLSAYNK
HRDKPIREQAENIIHLFTLTNLGAPRAFKYFDTTIDRKVYRSTKEVLDATLIHQSITGLYETRI
DLSQLGGDSGGSGGSGGSTNLSDIIEKETGKQLVIQESILMLPEEVEEVIGNKPESDILV
HTAYDESTDENVMLLTSDAPEYKPWALVIQDSNGENKIKMLSGGSGGSGGSTNLSDI
IEKETGKQLVIQESILMLPEEVEEVIGNKPESDILVHTAYDESTDENVMLLTSDAPEYK
PWALVIQDSNGENKIKMLSGGSKRTADGSEFEPKKKRKV
EE-SpCas9-NG base editor
(SEQ ID NO: 242)
MKRTADGSEFESPKKKRKVSSETGPVAVDPTLRRRIEPHEFEVFFDPRELRKETCLLY
EINWGGRHSIWRHTSQNTNKHVEVNFIEKFTTERYFCPNTRCSITWFLSWSPCGECSR
AITEFLSRYPHVTLFIYIARLYHHADPENRQGLEDLISSGVTIQIMTEQESGYCWRNFV
NYSPSNEAHWPRYPHLWVRLYVLELYCIILGLPPCLNILRRKQPQLTFFTIALQSCHY
QRLPPHILWATGLKSGGSSGGSSGSETPGTSESATPESSGGSSGGSDKKYSIGLAIGTNS
VGWAVITDEYKVPSKKFKVLGNTDRHSIKKNLIGALLFDSGETAEATRLKRTARRRYTRRK
NRICYLQEIFSNEMAKVDDSFFHRLEESFLVEEDKKHERHPIFGNIVDEVAYHEKYPTIYHL
RKKLVDSTDKADLRLIYLALAHMIKFRGHFLIEGDLNPDNSDVDKLFIQLVQTYNQLFEEN
PINASGVDAKAILSARLSKSRRLENLIAQLPGEKKNGLFGNLIALSLGLTPNFKSNFDLAED
AKLQLSKDTYDDDLDNLLAQIGDQYADLFLAAKNLSDAILLSDILRVNTEITKAPLSASMIK
RYDEHHQDLTLLKALVRQQLPEKYKEIFFDQSKNGYAGYIDGGASQEEFYKFIKPILEKM
DGTEELLVKLNREDLLRKQRTFDNGSIPHQIHLGELHAILRRQEDFYPFLKDNREKIEKIL
TFRIPYYVGPLARGNSRFAWMTRKSEETITPWNFEEVVDKGASAQSFIERMTNFDKNLPNE
KVLPKHSLLYEYFTVYNELTKVKYVTEGMRKPAFLSGEQKKAIVDLLFKTNRKVTVKQLKE
DYFKKIECFDSVEISGVEDRFNASLGTYHDLLKIIKDKDFLDNEENEDILEDIVLTLTLFED
REMIEERLKTYAHLFDDKVMKQLKRRRYTGWGRLSRKLINGIRDKQSGKTILDFLKSDGF
ANRNFMQLIHDDSLTFKEDIQKAQVSGQGDSLHEHIANLAGSPAIKKGILQTVKVVDELV
KVMGRHKPENIVIEMARENQTTQKGQKNSRERMKRIEEGIKELGSQILKEHPVENTQLQN
EKLYLYYLQNGRDMYVDQELDINRLSDYDVDHIVPQSFLKDDSIDNKVLTRSDKNRGKSD
NVPSEEVVKKMKNYWRQLLNAKLITQRKFDNLTKAERGGLSELDKAGFIKRQLVETRQIT
KHVAQILDSRMNTKYDENDKLIREVKVITLKSKLVSDFRKDFQFYKVREINNYHHAHDAYL
NAVVGTALIKKYPKLESEFVYGDYKVYDVRKMIAKSEQEIGKATAKYFFYSNIMNFFKTEIT
LANGEIRKRPLIETNGETGEIVWDKGRDFATVRKVLSMPQVNIVKKTEVQTGGFSKESIRP
KRNSDKLIARKKDWDPKKYGGFVSPTVAYSVLVVAKVEKGKSKKLKSVKELLGITIMERSS
FEKNPIDFLEAKGYKEVKKDLIIKLPKYSLFELENGRKRMLASARFLQKGNELALPSKYVN
FLYLASHYEKLKGSPEDNEQKQLFVEQHKHYLDEIIEQISEFSKRVILADANLDKVLSAYNK
HRDKPIREQAENIIHLFTLTNLGAPRAFKYFDTTIDRKVYRSTKEVLDATLIHQSITGLYETRI
DLSQLGGDSGGSGGSGGSTNLSDIIEKETGKQLVIQESILMLPEEVEEVIGNKPESDILV
HTAYDESTDENVMLLTSDAPEYKPWALVIQDSNGENKIKMLSGGSGGSGGSTNLSDI
IEKETGKQLVIQESILMLPEEVEEVIGNKPESDILVHTAYDESTDENVMLLTSDAPEYK
PWALVIQDSNGENKIKMLSGGSKRTADGSEFEPKKKRKV
R33A + K34A-SpCas9-NG base editor
(SEQ ID NO: 243)
MKRTADGSEFESPKKKRKVSSETGPVAVDPTLRRRIEPHEFEVFFDPRELAAETCLLY
EINWGGRHSIWRHTSQNTNKHVEVNFIEKFTTERYFCPNTRCSITWFLSWSPCGECSR
AITEFLSRYPHVTLFIYIARLYHHADPRNRQGLRDLISSGVTIQIMTEQESGYCWRNFV
NYSPSNEAHWPRYPHLWVRLYVLELYCIILGLPPCLNILRRKQPQLTFFTIALQSCHY
QRLPPHILWATGLKSGGSSGGSSGSETPGTSESATPESSGGSSGGSDKKYSIGLAIGTNS
VGWAVITDEYKVPSKKFKVLGNTDRHSIKKNLIGALLFDSGETAEATRLKRTARRRYTRRK
NRICYLQEIFSNEMAKVDDSFFHRLEESFLVEEDKKHERHPIFGNIVDEVAYHEKYPTIYHL
RKKLVDSTDKADLRLIYLALAHMIKFRGHFLIEGDLNPDNSDVDKLFIQLVQTYNQLFEEN
PINASGVDAKAILSARLSKSRRLENLIAQLPGEKKNGLFGNLIALSLGLTPNFKSNFDLAED
AKLQLSKDTYDDDLDNLLAQIGDQYADLFLAAKNLSDAILLSDILRVNTEITKAPLSASMIK
RYDEHHQDLTLLKALVRQQLPEKYKEIFFDQSKNGYAGYIDGGASQEEFYKFIKPILEKM
DGTEELLVKLNREDLLRKQRTFDNGSIPHQIHLGELHAILRRQEDFYPFLKDNREKIEKIL
TFRIPYYVGPLARGNSRFAWMTRKSEETITPWNFEEVVDKGASAQSFIERMTNFDKNLPNE
KVLPKHSLLYEYFTVYNELTKVKYVTEGMRKPAFLSGEQKKAIVDLLFKTNRKVTVKQLKE
DYFKKIECFDSVEISGVEDRFNASLGTYHDLLKIIKDKDFLDNEENEDILEDIVLTLTLFED
REMIEERLKTYAHLFDDKVMKQLKRRRYTGWGRLSRKLINGIRDKQSGKTILDFLKSDGF
ANRNFMQLIHDDSLTFKEDIQKAQVSGQGDSLHEHIANLAGSPAIKKGILQTVKVVDELV
KVMGRHKPENIVIEMARENQTTQKGQKNSRERMKRIEEGIKELGSQILKEHPVENTQLQN
EKLYLYYLQNGRDMYVDQELDINRLSDYDVDHIVPQSFLKDDSIDNKVLTRSDKNRGKSD
NVPSEEVVKKMKNYWRQLLNAKLITQRKFDNLTKAERGGLSELDKAGFIKRQLVETRQIT
KHVAQILDSRMNTKYDENDKLIREVKVITLKSKLVSDFRKDFQFYKVREINNYHHAHDAYL
NAVVGTALIKKYPKLESEFVYGDYKVYDVRKMIAKSEQEIGKATAKYFFYSNIMNFFKTEIT
LANGEIRKRPLIETNGETGEIVWDKGRDFATVRKVLSMPQVNIVKKTEVQTGGFSKESIRP
KRNSDKLIARKKDWDPKKYGGFVSPTVAYSVLVVAKVEKGKSKKLKSVKELLGITIMERSS
FEKNPIDFLEAKGYKEVKKDLIIKLPKYSLFELENGRKRMLASARFLQKGNELALPSKYVN
FLYLASHYEKLKGSPEDNEQKQLFVEQHKHYLDEIIEQISEFSKRVILADANLDKVLSAYNK
HRDKPIREQAENIIHLFTLTNLGAPRAFKYFDTTIDRKVYRSTKEVLDATLIHQSITGLYETRI
DLSQLGGDSGGSGGSGGSTNLSDIIEKETGKQLVIQESILMLPEEVEEVIGNKPESDILV
HTAYDESTDENVMLLTSDAPEYKPWALVIQDSNGENKIKMLSGGSGGSGGSTNLSDI
IEKETGKQLVIQESILMLPEEVEEVIGNKPESDILVHTAYDESTDENVMLLTSDAPEYK
PWALVIQDSNGENKIKMLSGGSKRTADGSEFEPKKKRKV
YE1-CP1028 base editor (YE1-BE4-CP1028, or YE1-CP)
(SEQ ID NO: 244)
MKRTADGSEFESPKKKRKVSSETGPVAVDPTLRRRIEPHEFEVFFDPRELRKETCLLY
EINWGGRHSIWRHTSQNTNKHVEVNFIEKFTTERYFCPNTRCSITWFLSYSPCGECSR
AITEFLSRYPHVTLFIYIARLYHHADPENRQGLRDLISSGVTIQIMTEQESGYCWRNFV
NYSPSNEAHWPRYPHLWVRLYVLELYCIILGLPPCLNILRRKQPQLTFFTIALQSCHY
QRLPPHILWATGLKSGGSSGGSSGSETPGTSESATPESSGGSSGGSEIGKATAKYFFYS
NIMNFFKTEITLANGEIRKRPLIETNGETGEIVWDKGRDFATVRKVLSMPQVNIVKKT
EVQTGGFSKESILPKRNSDKLIARKKDWDPKKYGGFDSPTVAYSVLVVAKVEKGKS
KKLKSVKELLGITIMERSSFEKNPIDFLEAKGYKEVKKDLIIKLPKYSLFELENGRKRM
LASAGELQKGNELALPSKYVNFLYLASHYEKLKGSPEDNEQKQLFVEQHKHYLDEII
EQISEFSKRVILADANLDKVLSAYNKHRDKPIREQAENIIHLFTLTNLGAPAAFKYFDT
TIDRKRYTSTKEVLDATLIHQSITGLYETRIDLSQLGGDGGSGGSGGSGGSGGSGGSG
GMDKKYSIGLAIGTNSVGWAVITDEYKVPSKKFKVLGNTDRHSIKKNLIGALLFDSGETAE
ATRLKRTARRRYTRRKNRICYLQEIFSNEMAKVDDSFFHRLEESFLVEEDKKHERHPIFGNI
VDEVAYHEKYPTIYHLRKKLVDSTDKADLRLIYLALAHMIKFRGHFLIEGDLNPDNSDVDK
LFIQLVQTYNQLFEENPINASGVDAKAILSARLSKSRRLENLIAQLPGEKKNGLFGNLIALSL
GLTPNFKSNFDLAEDAKLQLSKDTYDDDLDNLLAQIGDQYADLFLAAKNLSDAILLSDILR
VNTEITKAPLSASMIKRYDEHHQDLTLLKALVRQQLPEKYKEIFFDQSKNGYAGYIDGGAS
QEEFYKFIKPILEKMDGTEELLVKLNREDLLRKQRTFDNGSIPHQIHLGELHAILRRQEDF
YPFLKDNREKIEKILTFRIPYYVGPLARGNSRFAWMTRKSEETITPWNFEEVVDKGASAQSF
IERMTNFDKNLPNEKVLPKHSLLYEYFTVYNELTKVKYVTEGMRKPAFLSGEQKKAIVDLL
FKTNRKVTVKQLKEDYFKKIECFDSVEISGVEDRFNASLGTYHDLLKIIKDKDFLDNEENE
DILEDIVLTLTLFEDREMIEERLKTYAHLFDDKVMKQLKRRRYTGWGRLSRKLINGIRDKQ
SGKTILDFLKSDGFANRNFMQLIHDDSLTFKEDIQKAQVSGQGDSLHEHIANLAGSPAIKK
GILQTVKVVDELVKVMGRHKPENIVIEMARENQTTQKGQKNSRERMKRIEEGIKELGSQIL
KEHPVENTQLQNEKLYLYYLQNGRDMYVDQELDINRLSDYDVDHIVPQSFLKDDSIDNKV
LTRSDKNRGKSDNVPSEEVVKKMKNYWRQLLNAKLITQRKFDNLTKAERGGLSELDKAG
FIKRQLVETRQITKHVAQILDSRMNTKYDENDKLIREVKVITLKSKLVSDFRKDFQFYKVRE
INNYHHAHDAYLNAVVGTALIKKYPKLESEFVYGDYKVYDVRKMIAKSEQSGGSGGSGGS
TNLSDIIEKETGKQLVIQESILMLPEEVEEVIGNKPESDILVHTAYDESTDENVMLLTS
DAPEYKPWALVIQDSNGENKIKMLSGGSGGSGGSTNLSDIIEKETGKQLVIQESILML
PEEVEEVIGNKPESDILVHTAYDESTDENVMLLTSDAPEYKPWALVIQDSNGENKIK
MLSGGSKRTADGSEFEPKKKRKV
YE2-CP1028 base editor (YE2-BE4-CP1028)
(SEQ ID NO: 245)
MKRTADGSEFESPKKKRKVSSETGPVAVDPTLRRRIEPHEFEVFFDPRELRKETCLLY
EINWGGRHSIWRHTSQNTNKHVEVNFIEKFTTERYFCPNTRCSITWFLSYSPCGECSR
AITEFLSRYPHVTLFIYIARLYHHADPRNRQGLEDLISSGVTIQIMTEQESGYCWRNFV
NYSPSNEAHWPRYPHLWVRLYVLELYCIILGLPPCLNILRRKQPQLTFFTIALQSCHY
QRLPPHILWATGLKSGGSSGGSSGSETPGTSESATPESSGGSSGGSEIGKATAKYFFYS
NIMNFFKTEITLANGEIRKRPLIETNGETGEIVWDKGRDFATVRKVLSMPQVNIVKKT
EVQTGGFSKESILPKRNSDKLIARKKDWDPKKYGGFDSPTVAYSVLVVAKVEKGKS
KKLKSVKELLGITIMERSSFEKNPIDFLEAKGYKEVKKDLIIKLPKYSLFELENGRKRM
LASAGELQKGNELALPSKYVNFLYLASHYEKLKGSPEDNEQKQLFVEQHKHYLDEII
EQISEFSKRVILADANLDKVLSAYNKHRDKPIREQAENIIHLFTLTNLGAPAAFKYFDT
TIDRKRYTSTKEVLDATLIHQSITGLYETRIDLSQLGGDGGSGGSGGSGGSGGSGGSG
GMDKKYSIGLAIGTNSVGWAVITDEYKVPSKKFKVLGNTDRHSIKKNLIGALLFDSGETAE
ATRLKRTARRRYTRRKNRICYLQEIFSNEMAKVDDSFFHRLEESFLVEEDKKHERHPIFGNI
VDEVAYHEKYPTIYHLRKKLVDSTDKADLRLIYLALAHMIKFRGHFLIEGDLNPDNSDVDK
LFIQLVQTYNQLFEENPINASGVDAKAILSARLSKSRRLENLIAQLPGEKKNGLFGNLIALSL
GLTPNFKSNFDLAEDAKLQLSKDTYDDDLDNLLAQIGDQYADLFLAAKNLSDAILLSDILR
VNTEITKAPLSASMIKRYDEHHQDLTLLKALVRQQLPEKYKEIFFDQSKNGYAGYIDGGAS
QEEFYKFIKPILEKMDGTEELLVKLNREDLLRKQRTFDNGSIPHQIHLGELHAILRRQEDF
YPFLKDNREKIEKILTFRIPYYVGPLARGNSRFAWMTRKSEETITPWNFEEVVDKGASAQSF
IERMTNFDKNLPNEKVLPKHSLLYEYFTVYNELTKVKYVTEGMRKPAFLSGEQKKAIVDLL
FKTNRKVTVKQLKEDYFKKIECFDSVEISGVEDRFNASLGTYHDLLKIIKDKDFLDNEENE
DILEDIVLTLTLFEDREMIEERLKTYAHLFDDKVMKQLKRRRYTGWGRLSRKLINGIRDKQ
SGKTILDFLKSDGFANRNFMQLIHDDSLTFKEDIQKAQVSGQGDSLHEHIANLAGSPAIKK
GILQTVKVVDELVKVMGRHKPENIVIEMARENQTTQKGQKNSRERMKRIEEGIKELGSQIL
KEHPVENTQLQNEKLYLYYLQNGRDMYVDQELDINRLSDYDVDHIVPQSFLKDDSIDNKV
LTRSDKNRGKSDNVPSEEVVKKMKNYWRQLLNAKLITQRKFDNLTKAERGGLSELDKAG
FIKRQLVETRQITKHVAQILDSRMNTKYDENDKLIREVKVITLKSKLVSDFRKDFQFYKVRE
INNYHHAHDAYLNAVVGTALIKKYPKLESEFVYGDYKVYDVRKMIAKSEQSGGSGGSGGS
TNLSDIIEKETGKQLVIQESILMLPEEVEEVIGNKPESDILVHTAYDESTDENVMLLTS
DAPEYKPWALVIQDSNGENKIKMLSGGSGGSGGSTNLSDIIEKETGKQLVIQESILML
PEEVEEVIGNKPESDILVHTAYDESTDENVMLLTSDAPEYKPWALVIQDSNGENKIK
MLSGGSKRTADGSEFEPKKKRKV
YEE-CP1028 base editor (YEE-BE4-CP1028)
(SEQ ID NO: 246)
MKRTADGSEFESPKKKRKVSSETGPVAVDPTLRRRIEPHEFEVFFDPRELRKETCLLY
EINWGGRHSIWRHTSQNTNKHVEVNFIEKFTTERYFCPNTRCSITWFLSYSPCGECSR
AITEFLSRYPHVTLFIYIARLYHHADPENRQGLEDLISSGVTIQIMTEQESGYCWRNFV
NYSPSNEAHWPRYPHLWVRLYVLELYCIILGLPPCLNILRRKQPQLTFFTIALQSCHY
QRLPPHILWATGLKSGGSSGGSSGSETPGTSESATPESSGGSSGGSEIGKATAKYFFYS
NIMNFFKTEITLANGEIRKRPLIETNGETGEIVWDKGRDFATVRKVLSMPQVNIVKKT
EVQTGGFSKESILPKRNSDKLIARKKDWDPKKYGGFDSPTVAYSVLVVAKVEKGKS
KKLKSVKELLGITIMERSSFEKNPIDFLEAKGYKEVKKDLIIKLPKYSLFELENGRKRM
LASAGELQKGNELALPSKYVNFLYLASHYEKLKGSPEDNEQKQLFVEQHKHYLDEII
EQISEFSKRVILADANLDKVLSAYNKHRDKPIREQAENIIHLFTLTNLGAPAAFKYFDT
TIDRKRYTSTKEVLDATLIHQSITGLYETRIDLSQLGGDGGSGGSGGSGGSGGSGGSG
GMDKKYSIGLAIGTNSVGWAVITDEYKVPSKKFKVLGNTDRHSIKKNLIGALLFDSGETAE
ATRLKRTARRRYTRRKNRICYLQEIFSNEMAKVDDSFFHRLEESFLVEEDKKHERHPIFGNI
VDEVAYHEKYPTIYHLRKKLVDSTDKADLRLIYLALAHMIKFRGHFLIEGDLNPDNSDVDK
LFIQLVQTYNQLFEENPINASGVDAKAILSARLSKSRRLENLIAQLPGEKKNGLFGNLIALSL
GLTPNFKSNFDLAEDAKLQLSKDTYDDDLDNLLAQIGDQYADLFLAAKNLSDAILLSDILR
VNTEITKAPLSASMIKRYDEHHQDLTLLKALVRQQLPEKYKEIFFDQSKNGYAGYIDGGAS
QEEFYKFIKPILEKMDGTEELLVKLNREDLLRKQRTFDNGSIPHQIHLGELHAILRRQEDF
YPFLKDNREKIEKILTFRIPYYVGPLARGNSRFAWMTRKSEETITPWNFEEVVDKGASAQSF
IERMTNFDKNLPNEKVLPKHSLLYEYFTVYNELTKVKYVTEGMRKPAFLSGEQKKAIVDLL
FKTNRKVTVKQLKEDYFKKIECFDSVEISGVEDRFNASLGTYHDLLKIIKDKDFLDNEENE
DILEDIVLTLTLFEDREMIEERLKTYAHLFDDKVMKQLKRRRYTGWGRLSRKLINGIRDKQ
SGKTILDFLKSDGFANRNFMQLIHDDSLTFKEDIQKAQVSGQGDSLHEHIANLAGSPAIKK
GILQTVKVVDELVKVMGRHKPENIVIEMARENQTTQKGQKNSRERMKRIEEGIKELGSQIL
KEHPVENTQLQNEKLYLYYLQNGRDMYVDQELDINRLSDYDVDHIVPQSFLKDDSIDNKV
LTRSDKNRGKSDNVPSEEVVKKMKNYWRQLLNAKLITQRKFDNLTKAERGGLSELDKAG
FIKRQLVETRQITKHVAQILDSRMNTKYDENDKLIREVKVITLKSKLVSDFRKDFQFYKVRE
INNYHHAHDAYLNAVVGTALIKKYPKLESEFVYGDYKVYDVRKMIAKSEQSGGSGGSGGS
TNLSDIIEKETGKQLVIQESILMLPEEVEEVIGNKPESDILVHTAYDESTDENVMLLTS
DAPEYKPWALVIQDSNGENKIKMLSGGSGGSGGSTNLSDIIEKETGKQLVIQESILML
PEEVEEVIGNKPESDILVHTAYDESTDENVMLLTSDAPEYKPWALVIQDSNGENKIK
MLSGGSKRTADGSEFEPKKKRKV
EE-CP1028 base editor (EE-BE4-CP1028)
(SEQ ID NO: 247)
MKRTADGSEFESPKKKRKVSSETGPVAVDPTLRRRIEPHEFEVFFDPRELRKETCLLY
EINWGGRHSIWRHTSQNTNKHVEVNFIEKFTTERYFCPNTRCSITWFLSWSPCGECSR
AITEFLSRYPHVTLFIYIARLYHHADPENRQGLEDLISSGVTIQIMTEQESGYCWRNFV
NYSPSNEAHWPRYPHLWVRLYVLELYCIILGLPPCLNILRRKQPQLTFFTIALQSCHY
QRLPPHILWATGLKSGGSSGGSSGSETPGTSESATPESSGGSSGGSEIGKATAKYFFYS
NIMNFFKTEITLANGEIRKRPLIETNGETGEIVWDKGRDFATVRKVLSMPQVNIVKKT
EVQTGGFSKESILPKRNSDKLIARKKDWDPKKYGGFDSPTVAYSVLVVAKVEKGKS
KKLKSVKELLGITIMERSSFEKNPIDFLEAKGYKEVKKDLIIKLPKYSLFELENGRKRM
LASAGELQKGNELALPSKYVNFLYLASHYEKLKGSPEDNEQKQLFVEQHKHYLDEII
EQISEFSKRVILADANLDKVLSAYNKHRDKPIREQAENIIHLFTLTNLGAPAAFKYFDT
TIDRKRYTSTKEVLDATLIHQSITGLYETRIDLSQLGGDGGSGGSGGSGGSGGSGGSG
GMDKKYSIGLAIGTNSVGWAVITDEYKVPSKKFKVLGNTDRHSIKKNLIGALLFDSGETAE
ATRLKRTARRRYTRRKNRICYLQEIFSNEMAKVDDSFFHRLEESFLVEEDKKHERHPIFGNI
VDEVAYHEKYPTIYHLRKKLVDSTDKADLRLIYLALAHMIKFRGHFLIEGDLNPDNSDVDK
LFIQLVQTYNQLFEENPINASGVDAKAILSARLSKSRRLENLIAQLPGEKKNGLFGNLIALSL
GLTPNFKSNFDLAEDAKLQLSKDTYDDDLDNLLAQIGDQYADLFLAAKNLSDAILLSDILR
VNTEITKAPLSASMIKRYDEHHQDLTLLKALVRQQLPEKYKEIFFDQSKNGYAGYIDGGAS
QEEFYKFIKPILEKMDGTEELLVKLNREDLLRKQRTFDNGSIPHQIHLGELHAILRRQEDF
YPFLKDNREKIEKILTFRIPYYVGPLARGNSRFAWMTRKSEETITPWNFEEVVDKGASAQSF
IERMTNFDKNLPNEKVLPKHSLLYEYFTVYNELTKVKYVTEGMRKPAFLSGEQKKAIVDLL
FKTNRKVTVKQLKEDYFKKIECFDSVEISGVEDRFNASLGTYHDLLKIIKDKDFLDNEENE
DILEDIVLTLTLFEDREMIEERLKTYAHLFDDKVMKQLKRRRYTGWGRLSRKLINGIRDKQ
SGKTILDFLKSDGFANRNFMQLIHDDSLTFKEDIQKAQVSGQGDSLHEHIANLAGSPAIKK
GILQTVKVVDELVKVMGRHKPENIVIEMARENQTTQKGQKNSRERMKRIEEGIKELGSQIL
KEHPVENTQLQNEKLYLYYLQNGRDMYVDQELDINRLSDYDVDHIVPQSFLKDDSIDNKV
LTRSDKNRGKSDNVPSEEVVKKMKNYWRQLLNAKLITQRKFDNLTKAERGGLSELDKAG
FIKRQLVETRQITKHVAQILDSRMNTKYDENDKLIREVKVITLKSKLVSDFRKDFQFYKVRE
INNYHHAHDAYLNAVVGTALIKKYPKLESEFVYGDYKVYDVRKMIAKSEQSGGSGGSGGS
TNLSDIIEKETGKQLVIQESILMLPEEVEEVIGNKPESDILVHTAYDESTDENVMLLTS
DAPEYKPWALVIQDSNGENKIKMLSGGSGGSGGSTNLSDIIEKETGKQLVIQESILML
PEEVEEVIGNKPESDILVHTAYDESTDENVMLLTSDAPEYKPWALVIQDSNGENKIK
MLSGGSKRTADGSEFEPKKKRKV
R33A + K34A-CP1028 base editor (R33A + K34A-BE4-CP1028)
(SEQ ID NO: 248)
MKRTADGSEFESPKKKRKVSSETGPVAVDPTLRRRIEPHEFEVFFDPRELAAETCLLY
EINWGGRHSIWRHTSQNTNKHVEVNFIEKFTTERYFCPNTRCSITWFLSWSPCGECSR
AITEFLSRYPHVTLFIYIARLYHHADPRNRQGLRDLISSGVTIQIMTEQESGYCWRNFV
NYSPSNEAHWPRYPHLWVRLYVLELYCIILGLPPCLNILRRKQPQLTFFTIALQSCHY
QRLPPHILWATGLKSGGSSGGSSGSETPGTSESATPESSGGSSGGSEIGKATAKYFFYS
NIMNFFKTEITLANGEIRKRPLIETNGETGEIVWDKGRDFATVRKVLSMPQVNIVKKT
EVQTGGFSKESILPKRNSDKLIARKKDWDPKKYGGFDSPTVAYSVLVVAKVEKGKS
KKLKSVKELLGITIMERSSFEKNPIDFLEAKGYKEVKKDLIIKLPKYSLFELENGRKRM
LASAGELQKGNELALPSKYVNFLYLASHYEKLKGSPEDNEQKQLFVEQHKHYLDEII
EQISEFSKRVILADANLDKVLSAYNKHRDKPIREQAENIIHLFTLTNLGAPAAFKYFDT
TIDRKRYTSTKEVLDATLIHQSITGLYETRIDLSQLGGDGGSGGSGGSGGSGGSGGSG
GMDKKYSIGLAIGTNSVGWAVITDEYKVPSKKFKVLGNTDRHSIKKNLIGALLFDSGETAE
ATRLKRTARRRYTRRKNRICYLQEIFSNEMAKVDDSFFHRLEESFLVEEDKKHERHPIFGNI
VDEVAYHEKYPTIYHLRKKLVDSTDKADLRLIYLALAHMIKFRGHFLIEGDLNPDNSDVDK
LFIQLVQTYNQLFEENPINASGVDAKAILSARLSKSRRLENLIAQLPGEKKNGLFGNLIALSL
GLTPNFKSNFDLAEDAKLQLSKDTYDDDLDNLLAQIGDQYADLFLAAKNLSDAILLSDILR
VNTEITKAPLSASMIKRYDEHHQDLTLLKALVRQQLPEKYKEIFFDQSKNGYAGYIDGGAS
QEEFYKFIKPILEKMDGTEELLVKLNREDLLRKQRTFDNGSIPHQIHLGELHAILRRQEDF
YPFLKDNREKIEKILTFRIPYYVGPLARGNSRFAWMTRKSEETITPWNFEEVVDKGASAQSF
IERMTNFDKNLPNEKVLPKHSLLYEYFTVYNELTKVKYVTEGMRKPAFLSGEQKKAIVDLL
FKTNRKVTVKQLKEDYFKKIECFDSVEISGVEDRFNASLGTYHDLLKIIKDKDFLDNEENE
DILEDIVLTLTLFEDREMIEERLKTYAHLFDDKVMKQLKRRRYTGWGRLSRKLINGIRDKQ
SGKTILDFLKSDGFANRNFMQLIHDDSLTFKEDIQKAQVSGQGDSLHEHIANLAGSPAIKK
GILQTVKVVDELVKVMGRHKPENIVIEMARENQTTQKGQKNSRERMKRIEEGIKELGSQIL
KEHPVENTQLQNEKLYLYYLQNGRDMYVDQELDINRLSDYDVDHIVPQSFLKDDSIDNKV
LTRSDKNRGKSDNVPSEEVVKKMKNYWRQLLNAKLITQRKFDNLTKAERGGLSELDKAG
FIKRQLVETRQITKHVAQILDSRMNTKYDENDKLIREVKVITLKSKLVSDFRKDFQFYKVRE
INNYHHAHDAYLNAVVGTALIKKYPKLESEFVYGDYKVYDVRKMIAKSEQSGGSGGSGGS
TNLSDIIEKETGKQLVIQESILMLPEEVEEVIGNKPESDILVHTAYDESTDENVMLLTS
DAPEYKPWALVIQDSNGENKIKMLSGGSGGSGGSTNLSDIIEKETGKQLVIQESILML
PEEVEEVIGNKPESDILVHTAYDESTDENVMLLTSDAPEYKPWALVIQDSNGENKIK
MLSGGSKRTADGSEFEPKKKRKV

[0404] These disclosed CBEs exhibit low off-target editing frequencies, and in particular low Cas9-independent off-target editing frequencies, while exhibiting high on-target editing efficiencies. For example, the YE1-BE4, YE1-CP1028, YE1-SpCas9-NG, R33A-BE4, and R33A+K34A-BE4-CP1028 base editors may exhibit off-target editing frequencies of less than 0.75% (e.g., about 0.4% or less) while maintaining on-target editing efficiencies of about 60% or more, in target sequences in mammalian cells. (See, e.g., FIGS. 11, 15A, 15B and 17.) The Examples of the present disclosure suggest that CBEs with cytidine deaminases that have a low instrinsic catalytic efficiency (k_{cat}/Kₘ) for cytosine-containing ssDNA substrates exhibit reduced Cas9-independent off-target deamination.

[0405] In some embodiments, the fusion protein comprises an amino acid sequence that is at least 60%, at least 65%, at least 70%, at least 75%, at least 80%, at least 85%, at least 90%, at least 95%, at least 96%, at least 97%, at least 98%, at least 99%, or at least 99.5% identical to any one of the amino acid sequences set forth in any one of SEQ ID NOs: 223-248, or to any of the fusion proteins provided herein. In some embodiments, the fusion protein comprises an amino acid sequence that has 1, 2, 3, 4, 5, 6, 7, 8, 9, 10, 11, 12, 13, 14, 15, 16, 17, 18, 19, 20, 21, 22, 21, 24, 25, 26, 27, 28, 29, 30, 31, 32, 33, 34, 35, 36, 37, 38, 39, 40, 41, 42, 43, 44, 45, 46, 47, 48, 49, 50, or more mutations compared to any one of the amino acid sequences set forth in SEQ ID NOs: 223-248, or any of the fusion proteins provided herein. In some embodiments, the fusion protein comprises an amino acid sequence that has at least 5, at least 10, at least 15, at least 20, at least 25, at least 30, at least 35, at least 40, at least 45, at least 50, at least 60, at least 70, at least 80, at least 90, at least 100, at least 110, at least 120, at least 130, at least 140, at least 150, at least 160, at least 170, at least 200, at least 300, at least 400, at least 500, at least 600, at least 700, at least 800, at least 900, at least 1000, at least 1100, at least 1200, at least 1300, at least 1400, at least 1500, at least 1600, at least 1700, at least 1750, or at least 1800 identical contiguous amino acid residues as compared to any one of the amino acid sequences set forth in SEQ ID NOs: 223-248, or any of the fusion proteins provided herein. In some embodiments, the fusion protein (base editor) comprises the amino acid sequence of SEQ ID NO: 223, or a variant thereof that is at least 60%, at least 65%, at least 70%, at least 75%, at least 80%, at least 85%, at least 90%, at least 95%, at least 96%, at least 97%, at least 98%, at least 99%, or at least 99.5% identical.

[0406] In some embodiments, the base editor fusion proteins provided herein are capable of modifying a specific nucleotide base without generating a significant proportion of indels. An “indel”, as used herein, refers to the insertion or deletion of a nucleotide base within a nucleic acid. Such insertions or deletions can lead to frame shift mutations within a coding region of a gene. In some embodiments, it is desirable to generate base editors that efficiently modify (e.g. mutate or deaminate) a specific nucleotide within a nucleic acid, without generating a large number of insertions or deletions (i.e., indels) in the nucleic acid. In certain embodiments, any of the base editors provided herein are capable of generating a greater proportion of intended modifications (e.g., point mutations or deaminations) versus indels. In some embodiments, the base editors provided herein are capable of generating a ratio of intended point mutations to indels that is greater than 1:1. In some embodiments, the base editors provided herein are capable of generating a ratio of intended point mutations to indels that is at least 1.5:1, at least 2:1, at least 2.5:1, at least 3:1, at least 3.5:1, at least 4:1, at least 4.5:1, at least 5:1, at least 5.5:1, at least 6:1, at least 6.5:1, at least 7:1, at least 7.5:1, at least 8:1, at least 10:1, at least 12:1, at least 15:1, at least 20:1, at least 25:1, at least 30:1, at least 40:1, at least 50:1, at least 100:1, at least 200:1, at least 300:1, at least 400:1, at least 500:1, at least 600:1, at least 700:1, at least 800:1, at least 900:1, or at least 1000:1, or more. The number of intended mutations and indels may be determined using any suitable method. In some embodiments, to calculate indel frequencies, sequencing reads are scanned for exact matches to two 10-bp sequences that flank both sides of a window in which indels might occur. If no exact matches are located, the read is excluded from analysis. If the length of this indel window exactly matches the reference sequence the read is classified as not containing an indel. If the indel window is two or more bases longer or shorter than the reference sequence, then the sequencing read is classified as an insertion or deletion, respectively.

[0407] In some embodiments, the base editors provided herein are capable of limiting formation of indels in a region of a nucleic acid. In some embodiments, the region is at a nucleotide targeted by a base editor or a region within 2, 3, 4, 5, 6, 7, 8, 9, or 10 nucleotides of a nucleotide targeted by a base editor. In some embodiments, any of the base editors provided herein are capable of limiting the formation of indels at a region of a nucleic acid to less than 1%, less than 1.5%, less than 2%, less than 2.5%, less than 3%, less than 3.5%, less than 4%, less than 4.5%, less than 5%, less than 6%, less than 7%, less than 8%, less than 9%, less than 10%, less than 12%, less than 15%, or less than 20%. The number of indels formed at a nucleic acid region may depend on the amount of time a nucleic acid (e.g., a nucleic acid within the genome of a cell) is exposed to a base editor. In some embodiments, an number or proportion of indels is determined after at least 1 hour, at least 2 hours, at least 6 hours, at least 12 hours, at least 24 hours, at least 36 hours, at least 48 hours, at least 3 days, at least 4 days, at least 5 days, at least 7 days, at least 10 days, or at least 14 days of exposing a nucleic acid (e.g., a nucleic acid within the genome of a cell) to a base editor.

[0408] Some aspects of the disclosure are based on the recognition that any of the base editors provided herein are capable of efficiently generating an intended mutation, such as a point mutation, in a nucleic acid (e.g. a nucleic acid within a genome of a subject) without generating a significant number of unintended mutations, such as unintended point mutations. In some embodiments, an intended mutation is a mutation that is generated by a specific base editor bound to a gRNA, specifically designed to generate the intended mutation. In some embodiments, the intended mutation is a mutation associated with a disease or disorder. In some embodiments, the intended mutation is an adenine (A) to guanine (G) point mutation associated with a disease or disorder. In some embodiments, the intended mutation is a thymine (T) to cytosine (C) point mutation associated with a disease or disorder. In some embodiments, the intended mutation is an adenine (A) to guanine (G) point mutation within the coding region of a gene. In some embodiments, the intended mutation is a thymine (T) to cytosine (C) point mutation within the coding region of a gene. In some embodiments, the intended mutation is a point mutation that generates a stop codon, for example, a premature stop codon within the coding region of a gene. In some embodiments, the intended mutation is a mutation that eliminates a stop codon. In some embodiments, the intended mutation is a mutation that alters the splicing of a gene. In some embodiments, the intended mutation is a mutation that alters the regulatory sequence of a gene (e.g., a gene promotor or gene repressor). In some embodiments, any of the base editors provided herein are capable of generating a ratio of intended mutations to unintended mutations (e.g., intended point mutations:unintended point mutations) that is greater than 1:1. In some embodiments, any of the base editors provided herein are capable of generating a ratio of intended mutations to unintended mutations (e.g., intended point mutations:unintended point mutations) that is at least 1.5:1, at least 2:1, at least 2.5:1, at least 3:1, at least 3.5:1, at least 4:1, at least 4.5:1, at least 5:1, at least 5.5:1, at least 6:1, at least 6.5:1, at least 7:1, at least 7.5:1, at least 8:1, at least 10:1, at least 12:1, at least 15:1, at least 20:1, at least 25:1, at least 30:1, at least 40:1, at least 50:1, at least 100:1, at least 150:1, at least 200:1, at least 250:1, at least 500:1, or at least 1000:1, or more.

VII. gRNAs

[0409] Some aspects of the invention relate to guide sequences (“guide RNA” or “gRNA”) that are capable of guiding a napDNAbp or a base editor comprising a napDNAbp to a target site in SMN2 (e.g., C840T in SMN2). In various embodiments base editors (e.g., base editors provided herein) can be complexed, bound, or otherwise associated with (e.g., via any type of covalent or non-covalent bond) one or more guide sequences, i.e., the sequence which becomes associated or bound to the base editor and directs its localization to a specific target sequence having complementarity to the guide sequence or a portion thereof. The particular design aspects of a guide sequence will depend upon the nucleotide sequence of a genomic target site of interest (e.g., the mutant T840 residue of human SMN2) and the type of napDNA/RNAbp (e.g., type of Cas protein) present in the base editor, among other factors, such as PAM sequence locations, percent G/C content in the target sequence, the degree of microhomology regions, secondary structures, etc.

[0410] In general, a guide sequence is any polynucleotide sequence having sufficient complementarity with a target polynucleotide sequence to hybridize with the target sequence and direct sequence-specific binding of a napDNAbp (e.g., a Cas9, Cas9 homolog, or Cas9 variant) to the target sequence, such as a sequence within an SMN2 gene that comprises C840T. In some embodiments, the degree of complementarity between a guide sequence and its corresponding target sequence (e.g., SMN2), when optimally aligned using a suitable alignment algorithm, is about or more than about 50%, 60%, 75%, 80%, 85%, 90%, 95%, 97.5%, 99%, or more. Optimal alignment may be determined with the use of any suitable algorithm for aligning sequences, non-limiting example of which include the Smith-Waterman algorithm, the Needleman-Wunsch algorithm, algorithms based on the Burrows-Wheeler Transform (e.g. the Burrows Wheeler Aligner), ClustalW, Clustal X, BLAT, Novoalign (Novocraft Technologies, ELAND (Illumina, San Diego, Calif.), SOAP (available at soap.genomics.org.cn), and Maq (available at maq.sourceforge.net). In some embodiments, a guide sequence is about or more than about 5, 10, 11, 12, 13, 14, 15, 16, 17, 18, 19, 20, 21, 22, 23, 24, 25, 26, 27, 28, 29, 30, 31, 32, 33, 34, 35, 40, 45, 50, 75, or more nucleotides in length.

[0411] In some embodiments, a guide sequence is less than about 75, 50, 45, 40, 35, 30, 25, 20, 15, 12, or fewer nucleotides in length. The ability of a guide sequence to direct sequence-specific binding of a base editor to a target sequence may be assessed by any suitable assay. For example, the components of a base editor, including the guide sequence to be tested, may be provided to a host cell having the corresponding target sequence (e.g., a HGADFN 167 or HGADFN 188 cell line), such as by transfection with vectors encoding the components of a base editor disclosed herein, followed by an assessment of preferential cleavage within the target sequence, such as by Surveyor assay as described herein. Similarly, cleavage of a target polynucleotide sequence may be evaluated in a test tube by providing the target sequence, components of a base editor, including the guide sequence to be tested and a control guide sequence different from the test guide sequence, and comparing binding or rate of cleavage at the target sequence between the test and control guide sequence reactions. Other assays are possible, and will occur to those skilled in the art.

[0412] In some embodiments, a guide sequence designed to target C840T in SMN2. In some embodiments, the target sequence is a SMN2 sequence within a genome of a cell. An exemplary sequence within the human SMN2 gene that contains a wild-type C840T residue is provided below. It should be appreciated, however that additional exemplary SMN2 gene sequences are within the scope of this disclosure and guide RNAs can be designed to accommodate any differences between SMN2 sequences provided herein and any SMN2 sequences, or variants thereof (e.g., mutants), found in nature.

[0413] Portion of Homo sapiens SMN2 exon 7 genomic sequence (SEQ ID NO: 249), including the wild-type C840 residue that, when mutated, leads to the development of spinal muscular atrophy (SMA). The wild-type C840 residue is indicated in bold underlined.

(SEQ ID NO: 249)
5′-GGTTT [symbol] AGACAAAATCAAAAAGAAGGAAGGTGCTCACATTCCTTAA
ATTAA-3′

[0414] An exemplary portion of Homo sapiens SMN2 exon 7 gene (SEQ ID NO: 249), where the C840 residue has been mutated to a T, is provided below. The mutant T840 is indicated in bold. The underlined portion indicates the nucleic acid residues of mutant LMNA that is complementary to the nucleic residues of the guide sequence

(SEQ ID NO: 250)
5′-AUUUUGUCUAAAACCCUGUA-3′
(SEQ ID NO: 251)
5′-GGTTTTAGACAAAATCAAAAAGAAGGAAGGTGCTCACATTCCTTAA
ATTAA-3′

[0415] Additional exemplary portions of the SMN2 gene include the following:

(SEQ ID NO: 252)
5′-ATTTTCCTTACAGGGTTTTA-3′
(SEQ ID NO: 398)
5′-TTTTCCTTACAGGGTTTTAG-3′
(SEQ ID NO: 253)
5′-TTTCCTTACAGGGTTTTAGA-3′
(SEQ ID NO: 254)
5′-TTCCTTACAGGGTTTTAGAC-3′
(SEQ ID NO: 255)
5′-TCCTTACAGGGTTTTAGACA-3′
(SEQ ID NO: 256)
5′-CCTTACAGGGTTTTAGACAA-3′
(SEQ ID NO: 257)
5′-CTTACAGGGTTTTAGACAAA-3′
(SEQ ID NO: 258)
5′-TTACAGGGTTTTAGACAAAA-3′
(SEQ ID NO: 259)
5′-TACAGGGTTTTAGACAAAAT-3′
(SEQ ID NO: 260)
5′-ACAGGGTTTTAGACAAAATC-3′
(SEQ ID NO: 261)
5′-GTTTTAGACAAAATC-3′
(SEQ ID NO: 262)
5′-GGTTTTAGACAAAATCA-3′
(SEQ ID NO: 263)
5′-GGGTTTTAGACAAAATCAA-3′
(SEQ ID NO: 264)
5′-AGGGTTTTAGACAAAATCAAA-3′
(SEQ ID NO: 265)
5′-CAGGGTTTTAGACAAAATCAAAA-3′
(SEQ ID NO: 266)
5′-ACAGGGTTTTAGACAAAATCAAAA-3′
(SEQ ID NO: 267)
5′-CATAGAGCAGCACTAAATG-3′
(SEQ ID NO: 268)
5′-ATAGAGCAGCACTAAATGA-3′
(SEQ ID NO: 269)
5′-TAGAGCAGCACTAAATGAC-3′
(SEQ ID NO: 270)
5′-AGAGCAGCACTAAATGACA-3′
(SEQ ID NO: 271)
5′-GAGCAGCACTAAATGACAC-3′
(SEQ ID NO: 272)
5′-AGCAGCACTAAATGACACC-3′
(SEQ ID NO: 273)
5′-GCAGCACTAAATGACACCA-3′
(SEQ ID NO: 274)
5′-CAGCACTAAATGACACCAT-3′
(SEQ ID NO: 275)
5′-AGCACTAAATGACACCATA-3′
(SEQ ID NO: 276)
5′-GCACTAAATGACACCATAA-3′
(SEQ ID NO: 277)
5′-TAAATGACACCATAA-3′
(SEQ ID NO: 278)
5′-CTAAATGACACCATAAA-3′
(SEQ ID NO: 279)
5′-ACTAAATGACACCATAAAG-3′
(SEQ ID NO: 280)
5′-CACTAAATGACACCATAAAGA-3′
(SEQ ID NO: 281)
5′-GCACTAAATGACACCATAAAGAA-3′
(SEQ ID NO: 282)
5′-AGCACTAAATGACACCATAAAGAAA-3′
(SEQ ID NO: 283)
5′-AATTTCATGGTACATGAGTG-3′
(SEQ ID NO: 399)
5′-ATTTCATGGTACATGAGTGG-3′
(SEQ ID NO: 284)
5′-TTTCATGGTACATGAGTGGC-3′
(SEQ ID NO: 285)
5′-TTCATGGTACATGAGTGGCT-3′
(SEQ ID NO: 286)
5′-TCATGGTACATGAGTGGCTA-3′
(SEQ ID NO: 287)
5′-CATGGTACATGAGTGGCTAT-3′
(SEQ ID NO: 288)
5′-ATGGTACATGAGTGGCTATC-3′
(SEQ ID NO: 289)
5′-TGGTACATGAGTGGCTATCA-3′
(SEQ ID NO: 290)
5′-GGTACATGAGTGGCTATCAT-3′
(SEQ ID NO: 291)
5′-GTACATGAGTGGCTATCATA-3′
(SEQ ID NO: 292)
5′-TGAGTGGCTATCATA-3′
(SEQ ID NO: 293)
5′-ATGAGTGGCTATCATAC-3′
(SEQ ID NO: 294)
5′-CATGAGTGGCTATCATACT-3′
(SEQ ID NO: 295)
5′-ACATGAGTGGCTATCATACTG-3′
(SEQ ID NO: 296)
5′-TACATGAGTGGCTATCATACTGG-3′

[0416] The disclosure also contemplates exemplary portions of the SMN2 gene that are shorter or longer than any one of the exemplary portions of the SMN2 gene provided in any one of SEQ ID NOs: 252-298, 398, and 399. It should be appreciated that guide sequences may be engineered that are complementary (e.g., 100% complementary) to any of the exemplary portions of the SMN2 gene provided herein (e.g., SEQ ID NOs: 252-298, 398, and 399). In some embodiments, a guide sequence is complementary (e.g., 100% complementary) to any one of SEQ ID NOs: 250-298, 398, and 399. In some embodiments, a guide sequence is complementary (e.g., 100% complementary) to a sequence of any one of SEQ ID NOs: 250-298,398, and 399 absent the first 1, 2, 3, 4, 5, 7, 8, 9, 10, 11, or 12 nucleic acid residues at the 5′ end. In some embodiments, a guide sequence is complementary (e.g., 100% complementary) to a sequence of any one of SEQ ID NOs: 250-298, 398, and 399 absent the first 1, 2, 3, 4, 5, 7, 8, 9, 10, 11, or 12 nucleic acid residues at the 3′ end.

[0417] In some embodiments, a guide sequence is selected to reduce the degree of secondary structure within the guide sequence. Secondary structure may be determined by any suitable polynucleotide folding algorithm. Some programs are based on calculating the minimal Gibbs free energy. An example of one such algorithm is mFold, as described by Zuker and Stiegler (Nucleic Acids Res. 9 (1981), 133-148). Another example folding algorithm is the online webserver RNAfold, developed at Institute for Theoretical Chemistry at the University of Vienna, using the centroid structure prediction algorithm (see e.g. A. R. Gruber et al., 2008, Cell 106(1): 23-24; and P A Carr and G M Church, 2009, Nature Biotechnology 27(12): 1151-62). Further algorithms may be found in U.S. application Ser. No. 61/836,080; Broad Reference BI-2013/004A); incorporated herein by reference.

[0418] In general, a tracr mate sequence includes any sequence that has sufficient complementarity with a tracr sequence to promote one or more of: (1) excision of a guide sequence flanked by tracr mate sequences in a cell containing the corresponding tracr sequence; and (2) formation of a complex at a target sequence, wherein the complex comprises the tracr mate sequence hybridized to the tracr sequence. In general, degree of complementarity is with reference to the optimal alignment of the tracr mate sequence and tracr sequence, along the length of the shorter of the two sequences. Optimal alignment may be determined by any suitable alignment algorithm, and may further account for secondary structures, such as self-complementarity within either the tracr sequence or tracr mate sequence. In some embodiments, the degree of complementarity between the tracr sequence and tracr mate sequence along the length of the shorter of the two when optimally aligned is about or more than about 25%, 30%, 40%, 50%, 60%, 70%, 80%, 90%, 95%, 97.5%, 99%, or higher. In some embodiments, the tracr sequence is about or more than about 5, 6, 7, 8, 9, 10, 11, 12, 13, 14, 15, 16, 17, 18, 19, 20, 25, 30, 40, 50, or more nucleotides in length. In some embodiments, the tracr sequence and tracr mate sequence are contained within a single transcript, such that hybridization between the two produces a transcript having a secondary structure, such as a hairpin. Preferred loop forming sequences for use in hairpin structures are four nucleotides in length, and most preferably have the sequence GAAA. However, longer or shorter loop sequences may be used, as may alternative sequences. The sequences preferably include a nucleotide triplet (for example, AAA), and an additional nucleotide (for example C or G). Examples of loop forming sequences include CAAA and AAAG. In an embodiment of the invention, the transcript or transcribed polynucleotide sequence has at least two or more hairpins. In preferred embodiments, the transcript has two, three, four or five hairpins. In a further embodiment of the invention, the transcript has at most five hairpins. In some embodiments, the single transcript further includes a transcription termination sequence; preferably this is a polyT sequence, for example six T nucleotides. Further non-limiting examples of single polynucleotides comprising a guide sequence, a tracr mate sequence, and a tracr sequence are as follows (listed 5′ to 3′), where “N” represents a base of a guide sequence, the first block of lower case letters represent the tracr mate sequence, and the second block of lower case letters represent the tracr sequence, and the final poly-T sequence represents the transcription terminator:

(1)
(SEQ ID NO: 297)
NNNNNNNNgtttttgtactctcaagatttaGAAAtaaatcttgcagaag
ctacaaagataaggcttcatgccgaaatcaacaccctgtcattttatgg
cagggtgttttcgttatttaaTTTTTT;
(2)
(SEQ ID NO: 298);
NNNNNNNNNNNNNNNNNNgtttttgtactctcaGAAAtgcagaagctac
aaagataaggcttcatgccgaaatcaacaccctgtcattttatggcagg
gtgttttcgttatttaaTTTTTT
(3)
(SEQ ID NO: 299);
NNNNNNNNNNNNNNNNNNNNgtttttgtactctcaGAAAtgcagaagct
acaaagataaggcttcatgccgaaatca acaccctgtcattttatggc
agggtgtTTTTT
(4)
(SEQ ID NO: 300);
NNNNNNNNNNNNNNNNNNNNgttttagagctaGAAAtagcaagttaaaa
taaggctagtccgttatcaacttgaaaa agtggcaccgagtcggtgcT
TTTTT
(5)
(SEQ ID NO: 301);
NNNNNNNNNNNNNNNNNNNNgttttagagctaGAAATAGcaagttaaaa
taaggctagtccgttatcaacttgaa aaagtgTTTTTTT
and
(6)
(SEQ ID NO: 302)
NNNNNNNNNNNNNNNNNNNNgttttagagctagAAATAGcaagttaaaat
aaggctagtccgttatcaTTTTT TTT.

[0419] The disclosure also relates to guide RNA sequences that are variants of any of the herein disclosed guide RNA sequences or target sequences (including SEQ ID NOs.: 250-302), wherein the variants include guide RNA sequences or target sequences having a deletion of 1, 2, 3, 4, 5, 6, 7, 8, 9, 10, 11, 12, 13, 14, 15, 16, 17, 18, 19, 20, 21, 22, 23, 24, 25, 26, 27, 28, 29, or 30 nucleotides from any of the guide RNA or target sequence disclosed herein (e.g., SEQ ID NOs.: 250-302). In other embodiments, the variants also include guide RNA sequences or target sequences having at least 70%, 71%, 72%, 73%, 74%, 75%, 76%, 77%, 78%, 79%, 80%, 81%, 82%, 83%, 84%, 85%, 86%, 87%, 88%, 89%, 90%, 91%, 92%, 93%, 94%, 95%, 96%, 97%, 98%, 99%, or up to 99.9% sequence identity with a guide RNA or target sequence disclosed herein (e.g., SEQ ID NOs.: 250-302).

[0420] In some embodiments, sequences (1) to (3) are used in combination with Cas9 from S. thermophilus CRISPR. In some embodiments, sequences (4) to (6) are used in combination with Cas9 from S. pyogenes. In some embodiments, the tracr sequence is a separate transcript from a transcript comprising the tracr mate sequence.

[0421] It will be apparent to those of skill in the art that in order to target any of the fusion proteins comprising a Cas9 domain and an adenosine deaminase, as disclosed herein, to a target site, e.g., a site comprising C840T in SMN2 to be edited, it is typically necessary to co-express the fusion protein together with a guide RNA, e.g., an sgRNA. As explained in more detail elsewhere herein, a guide RNA typically comprises a tracrRNA framework allowing for Cas9 binding, and a guide sequence, which confers sequence specificity to the Cas9:nucleic acid editing enzyme/domain fusion protein.

[0422] In some embodiments, the guide RNA comprises a structure 5′-[guide sequence]-[Cas9-binding sequence]-3′, where the Cas9 binding sequence comprises a nucleic acid sequence that is at least 70%, 75%, 80%, 85%, 90%, 95%, 96%, 97%, 98%, 99%, or 99.5% identical to SEQ ID NO: 306-323, and which are effective to targeting C840T in SMN2. In other embodiments, the guide RNA comprises a structure 5′-[guide sequence]-[Cas9-binding sequence]-3′, where the Cas9 binding sequence comprises a nucleic acid sequence that is at least 70%, 75%, 80%, 85%, 90%, 95%, 96%, 97%, 98%, 99%, or 99.5% identical to SEQ ID NO: 324-329, and which are effective to targeting a stop codon in exon 8 of SMN2. In yet other embodiments, the guide RNA comprises a structure 5′-[guide sequence]-[Cas9-binding sequence]-3′, where the Cas9 binding sequence comprises a nucleic acid sequence that is at least 70%, 75%, 80%, 85%, 90%, 95%, 96%, 97%, 98%, 99%, or 99.5% identical to SEQ ID NO: 330, and which are effective to targeting the S270 amino acid in exon 6 of SMN2. In some embodiments, the guide RNA comprises a structure 5′-[guide sequence]-[Cas9-binding sequence]-3′, where the Cas9 binding sequence comprises a nucleic acid sequence SEQ ID NO: 303, SEQ ID NO: 304, or SEQ ID NO: 303 or 304 absent the poly-U terminator sequence at the 3′ end.

(SEQ ID NO: 303)
5′GUUUUAGAGCUAGAAAUAGCAAGUUAAAAUAAAGGCUAGUCCGUUAU
CAACUUGAAAAAGUGGCACCGAGUCGGUGCUUUUU-3′
(SEQ ID NO: 304)
5′GUUUUAGAGCUAGAAAUAGCAAGUUAAAAUAAGGCUAGUCCGUUAUC
AACUUGAAAAAGUGGCACCGAGUCGGUGCUUUUUUU-3′

[0423] In some embodiments, the guide RNA comprises a nucleic acid sequence that is at least 70%, 75%, 80%, 85%, 90%, 95%, 96%, 97%, 98%, 99%, or 99.5% identical to SEQ ID NO: 305, or SEQ ID NO: 305 absent the poly-U terminator sequence at the 3′ end. In some embodiments, the guide RNA comprises the nucleic acid sequence SEQ ID NO: 305, or SEQ ID NO: 305 absent the poly-U terminator sequence at the 3′ end.

[0424] In some embodiments, the guide RNA comprises the nucleic acid sequence

(SEQ ID NO: 305)
5′GGUCCACCCACCUGGGCUCCGUUUUAGAGCUAGAAAUAGCAAGUUAA
AAUAAGGCUAGUCCGUUAUCAACUUGAAAAAGUGGCACCGAGUCGGUGC
UUUUUUU-3′.

[0425] The guide sequence is typically approximately 20 nucleotides long. Exemplary guide sequences for targeting a base editor (e.g., ABE7.10) to a site comprising C840T in SMN2 are provided below. It should be appreciated, however, that changes to such guide sequences can be made based on the specific SMN2 sequence found within a cell, for example the cell of a patient having spinal muscular atrophy (SMA). Such suitable guide RNA sequences typically comprise guide sequences that are complementary to a nucleic sequence within 50 nucleotides upstream or downstream of the target nucleotide to be edited.

[0426] Exemplary guide sequences to target C840T in SMN2:

(SEQ ID NO: 306)
5′-UUUUUGAUUUUGUCUAAAACCCUGUA-3′
(SEQ ID NO: 307)
5′-UUUUGAUUUUGUCUAAAACCCUGUA-3′
(SEQ ID NO: 308)
5′-UUUGAUUUUGUCUAAAACCCUGUA-3′
(SEQ ID NO: 309)
5′-UUGAUUUUGUCUAAAACCCUGUA-3′
(SEQ ID NO: 310)
5′-UGAUUUUGUCUAAAACCCUGUA-3′
(SEQ ID NO: 311)
5′-GAUUUUGUCUAAAACCCUGUA-3′
(SEQ ID NO: 312)
5′-AUUUUGUCUAAAACCCUGUA-3′
(SEQ ID NO: 313)
5′-UUUUGUCUAAAACCCUGUA-3′
(SEQ ID NO: 314)
5′-UUUGUCUAAAACCCUGUA-3′
(SEQ ID NO: 315)
5′-UUGUCUAAAACCCUGUA-3′
(SEQ ID NO: 316)
5′-UGUCUAAAACCCUGUA-3′
(SEQ ID NO: 317)
5′-UUUGUCUAAAACCCUGUAAG-3′
(SEQ ID NO: 318)
5′-UUUUGUCUAAAACCCUGUAA-3′
(SEQ ID NO: 319)
5′-UGAUUUUGUCUAAAACCC-3′
(SEQ ID NO: 320)
5′-GAUUUUGUCUAAAACCCU-3′
(SEQ ID NO: 321)
5′-AUUUUGUCUAAAACCCUG-3′
(SEQ ID NO: 322)
5′-GUCUAAAACCCUGUAAGG-3′
(SEQ ID NO: 323)
5′-UCUAAAACCCUGUAAGGA-3′
(SEQ ID NO: 451)
5′-GAUUUUGUCUAAAACCCUGUAAG-3′
(SEQ ID NO: 452)
5′-UUGUCUAAAACCCUGUAAGG-3′
(SEQ ID NO: 453)
5′-UGUCUAAAACCCUGUAAGGA-3′
(SEQ ID NO: 454)
5′-GUCUAAAACCCUGUAAGGAA-3′
Exemplary guide sequences to target a stop
codon in exon 8 of SMN2:
(SEQ ID NO: 324)
5′-UUUGCAGGAAAUGCUGGCAU-3′
(SEQ ID NO: 325)
5′-UUCUCAUUUGCAGGAAAUGC-3′
(SEQ ID NO: 326)
5′-CAUUUAGUGCUGCUCUAUGC-3′
(SEQ ID NO: 327)
5′-CAGGAAAUGCUGGCAUAGAG-3′
(SEQ ID NO: 328)
5′-UUGCAGGAAAUGCUGGCAUA-3′
(SEQ ID NO: 329)
5′-AUUUGCAGGAAAUGCUGGCA-3′

[0427] Exemplary guide sequences to target the S270 amino acid in exon 6 of SMN2:

(SEQ ID NO: 330)
5′-UACAUGAGUGGCUAUCAUAC-3′

[0428] Exemplary guide sequences to target SMN2 ISS-N1:

(SEQ ID NO: 455)
5′-AAAAGUAAGAUUCACUUUCA-3′
(SEQ ID NO: 456)
5′-CAAAAGUAAGAUUCACUUUC-3′
(SEQ ID NO: 457)
5′-ACAAAAGUAAGAUUCACUUU-3′
(SEQ ID NO: 458)
5′-UACAAAAGUAAGAUUCACUU-3′

[0429] For the exemplary guide sequences provided above (e.g., SEQ ID NOs: 306-323), the A that is complementary to the mutant T of T840 in SMN2 is shown in bold. For the exemplary guide sequences provided above (e.g., SEQ ID NOs: 324-329), the A that is complementary to a stop codon comprising T of exon 8 in SMN2 is shown in bold. For the exemplary guide sequences provided above (e.g., SEQ ID NO: 330), the A that is complementary to the S270 codon T of in exon 6 of SMN2 is shown in bold.

[0430] The disclosure also provides guide sequences that are truncated variants of any of the guide sequences provided herein (e.g., SEQ ID NOs: 306-330). In some embodiments, the guide sequence comprises the amino acid sequence of any one of SEQ ID NOs: 306-330, absent the first 1, 2, 3, 4, 5, 6, 7, 8, 9, or 10 nucleic acid residues from the 5′ end. It should be appreciated that any of the 5′ truncated guide sequences provided herein may further comprise a G residue at the 5′ end. In some embodiments, the guide sequence comprises the amino acid sequence of any one of SEQ ID NOs: 306-330, absent the first 1, 2, 3, 4, 5, 6, 7, 8, 9, 10, 11, or 12 nucleic acid residues from the 3′ end.

[0431] The disclosure also provides guide sequences that are longer variants of any of the guide sequences provided herein (e.g., SEQ ID NOs: 306-330). In some embodiments, the guide sequence comprises one additional residue that is 5′-U-3′ at the 3′ end of any one of SEQ ID NOs: 306-330. In some embodiments, the guide sequence comprises two additional residues that are 5′-UG-3′ at the 3′ end of any one of SEQ ID NOs: 306-330. In some embodiments, the guide sequence comprises three additional residues that are 5′-UGA-3′ at the 3′ end of any one of SEQ ID NOs: 306-330. In some embodiments, the guide sequence comprises four additional residues that are 5′-UGAG-3′ at the 3′ end of any one of SEQ ID NOs: 306-330. In some embodiments, the guide sequence comprises five additional residues that are 5′-UGAGC-3′ at the 3′ end of any one of SEQ ID NOs: 306-330. In some embodiments, the guide sequence comprises six additional residues that are 5′-UGAGCC-3′ at the 3′ end of any one of SEQ ID NOs: 306-330. In some embodiments, the guide sequence comprises seven additional residues that are 5′-UGAGCCG-3′ at the 3′ end of any one of SEQ ID NOs: 306-330. In some embodiments, the guide sequence comprises eight additional residues that are 5′-UGAGCCGC-3′ at the 3′ end of any one of SEQ ID NOs: 306-330. In some embodiments, the guide sequence comprises nine additional residues that are 5′-UGAGCCGCU-3′ at the 3′ end of any one of SEQ ID NOs: 306-330. In some embodiments, the guide sequence comprises ten additional residues that are 5′-UGAGCCGCUG-3′ (SEQ ID NO: 400) at the 3′ end of any one of SEQ ID NOs: 306-330. In some embodiments, the guide sequence comprises eleven additional residues that are 5′-UGAGCCGCUGG-3′ (SEQ ID NO: 401) at the 3′ end of any one of SEQ ID NOs: 306-330.

### VII. Fusion Protein/gRNA Complexes

[0432] Some aspects of this disclosure provide complexes comprising any of the fusion proteins (e.g., base editor) provided herein, for example any of the adenosine base editors provided herein, and a guide nucleic acid bound to napDNAbp of the fusion protein. In some embodiments, the guide nucleic acid is any one of the guide RNAs provided herein. In some embodiments, the disclosure provides any of the fusion proteins (e.g., adenosine base editors) provided herein bound to any of the guide RNAs provided herein. In some embodiments, the napDNAbp of the fusion protein (e.g., adenosine base editor) is a Cas9 domain (e.g., a dCas9, a nuclease active Cas9, or a Cas9 nickase), which is bound to a guide RNA. In some embodiments, the complexes provided herein are configured to generate a mutation in a nucleic acid, for example to correct a point mutation in a gene (e.g., SMN2) to modulate expression of one or more proteins (e.g., SMN).

[0433] In some embodiments, the guide RNA comprises a guide sequence that comprises at least 8, 9, 10, 11, 12, 13, 14, 15, 16, 17, 18, 19, 20, 21, 22, 23, 24, 25, 26, 27, 28, 29, or 30 contiguous nucleic acids that are 100% complementary to a target sequence, for example a target DNA sequence (e.g., a target DNA sequence of any one of SEQ ID NOs: 253-296 and 398-399). In some embodiments, the guide RNA comprises a guide sequence that comprises at least 8, 9, 10, 11, 12, 13, 14, 15, 16, 17, 18, 19, 20, 21, 22, 23, 24, 25, 26, 27, 28, 29, or 30 contiguous nucleic acids that are 100% complementary to a DNA sequence in a SMN2 gene (e.g., a target DNA sequence of any one of SEQ ID NOs: 253-296 and 398-399), for example a region of a human SMN2 gene. In some embodiments, the SMN2 is the SMN2 of Gene ID: 6607.

[0434] In some embodiments, any of the complexes provided herein comprise a gRNA having a guide sequence that comprises at least 8, 9, 10, 11, 12, 13, 14, 15, 16, 17, 18, 19, 20, 21, 22, 23, 24, 25, 26, 27, 28, 29, or 30 contiguous nucleic acids that are 100% complementary to any one of the nucleic acid sequences provided herein. It should be appreciated that the guide sequence of the gRNA may comprise one or more nucleotides that are not complementary to a target sequence. In some embodiments, the guide sequence of the gRNA is at the 5′ end of the gRNA. In some embodiments, the guide sequence of the gRNA further comprises a G at the 5′ end of the gRNA. In some embodiments, the G at the 5′ end of the gRNA is not complementary with the target sequence. In some embodiments, the guide sequence of the gRNA comprises 1, 2, 3, 4, 5, 6, 7, or 8 nucleotides that are not complementary to a target sequence (e.g., any of the target sequences provided herein (e.g., SEQ ID NOs: 297-305, 306-362, 400-401, and 405-406)). In some embodiments, the gRNA comprises the sequence of SEQ ID NO: 297, or the sequence of any one of SEQ ID NOs: 297-305, 306-362, 400-401, and 405-406, where the nucleotide target is indicated in bold. It should be appreciated that the T's indicated in any of the gRNA sequences of SEQ ID NOs: 297-305, 306-362, 400-401, and 405-406 are uricils (Us) in the RNA sequence. Accordingly, in some embodiments, the gRNA comprises the sequence 5′-AUUUUGUCUAAAACCCUGUA-3′ (SEQ ID NO: 312).

[0435] In some embodiments, the guide RNA comprises a guide sequence that comprises at least 8, 9, 10, 11, 12, 13, 14, 15, 16, 17, 18, 19, 20, 21, 22, 23, 24, 25, 26, 27, 28, 29, or 30 contiguous nucleic acids that are 100% complementary to a target sequence, for example a target DNA sequence in a SMN2 gene. In some embodiments, the guide RNA comprises a guide sequence that comprises at least 8, 9, 10, 11, 12, 13, 14, 15, 16, 17, 18, 19, 20, 21, 22, 23, 24, 25, 26, 27, 28, 29, or 30 contiguous nucleic acids that are 100% complementary to a DNA sequence in a human SMN2 gene. In some embodiments, the SMN2 gene is a human, chimpanzee, ape, monkey, dog, mouse, or rat SMN2 gene. In some embodiments, the SMN2 gene is a human SMN2 gene. In some embodiments, the SMN2 gene is the SMN2 gene of Gene ID: 6607, which has also been referred to as SMNC, BCD541, GEMIN1, TDRD16B, or C-BCD541.

### IX. Editing Methods

[0436] Some aspects of this disclosure provide methods of using the fusion proteins, or complexes comprising a guide nucleic acid (e.g., gRNA) and a nucleobase editor provided herein to edit DNA, e.g., to edit SMN2. For example, some aspects of this disclosure provide methods comprising contacting a DNA, or RNA molecule with any of the fusion proteins provided herein, and with at least one guide nucleic acid (e.g., guide RNA), wherein the guide nucleic acid, (e.g., guide RNA) is comprises a sequence (e.g., a guide sequence that binds to a DNA target sequence) of at least 10 (e.g., at least 10, 15, 20, 25, or 30) contiguous nucleotides that is 100% complementary to a target sequence (e.g., any of the target SMN2 sequences provided herein). In some embodiments, the 3′ end of the target sequence is immediately adjacent to a canonical PAM sequence (NGG). In some embodiments, the 3′ end of the target sequence is not immediately adjacent to a canonical PAM sequence (NGG). In some embodiments, the 3′ end of the target sequence is immediately adjacent to an AGC, GAG, TTT, GTG, or CAA sequence.

[0437] Some aspects of the disclosure provide methods of using base editors (e.g., any of the fusion proteins provided herein) and gRNAs to correct a point mutation in an SMN2 gene. In some embodiments, the disclosure provides methods of using base editors (e.g., any of the fusion proteins provided herein) and gRNAs to generate an A to G and/or T to C mutation in an SMN2 gene. In some embodiments, the disclosure provides method for deaminating an adenosine nucleobase (A) in an SMN2 gene, the method comprising contacting the SMN2 gene with a base editor and a guide RNA bound to the base editor, where the guide RNA comprises a guide sequence that is complementary to a target nucleic acid sequence in the SMN2 gene. In some embodiments, the SMN2 gene comprises a C to T mutation. In some embodiments, the C to T mutation in the SMN2 gene masks an acceptor splice site, resulting in a truncated SMN protein encoded by the SMN2 gene (i.e., exon 7 is not transcribed). While the resulting protein functions as a full-length SMN protein, it is prone to rapid degradation due to the presence of an EMLA (SEQ ID NO: 466) tail from exon 8 and the exposed exon 6 C-terminal amino acid chain. In some embodiments, the C to T mutation in the SMN2 gene results in the degradation of at least 1%, 2%, 5%, 10%, 15%, 20%, 25%, 30%, 35%, 40%, 45%, 50%, 55%, 60%, 65%, 70%, 75%, 80%, 85%, 90%, 95%, 98%, or at least 99% of the resulting SMN protein.

[0438] In some embodiments, deaminating an adenosine (A) nucleobase complementary to the T corrects the C to T mutation in the SMN2 gene. In some embodiments, the C to T or G to A mutation in the SMN2 gene leads to a Cys (C) to Tyr (Y) mutation in the SMN2 protein encoded by the SMN2 gene. In some embodiments, deaminating the adenosine nucleobase complementary to the T corrects the Cys to Tyr mutation in the SMN2 protein.

[0439] In some embodiments, the guide sequence of the gRNA comprises at least 8, 9, 10, 11, 12, 13, 14, 15, 16, 17, 18, 19, 20, 21, 22, 23, 24, 25, 26, 27, 28, 29, 30, 31, 32, 33, 34, or 35 contiguous nucleic acids that are 100% complementary to a target nucleic acid sequence of the SMN2 gene. In some embodiments, the base editor nicks the target sequence that is complementary to the guide sequence.

[0440] In some embodiments, the target DNA sequence comprises a sequence associated with a disease or disorder, e.g., SMA. In some embodiments, the target DNA sequence comprises a point mutation associated with a disease or disorder (e.g., exon 7 of SMN2). In some embodiments, the activity of the fusion protein (e.g., comprising an adenosine deaminase and a Cas9 domain), or the complex, results in a correction of the point mutation. In some embodiments, the target DNA sequence comprises a C→T point mutation associated with a disease or disorder, and wherein the deamination of the mutant base results in a sequence that is not associated with a disease or disorder. In some embodiments, the target DNA sequence encodes a protein, and the point mutation is in a codon and results in a change in the splice site of an exon, resulting in production of a full-length, fully functional protein (e.g., SMN protein). In some embodiments, the deamination of the mutant base results in the wild-type amino acid.

[0441] In some embodiments, the target DNA sequence comprises a sequence associated with a stop codon in an exon 8 of a SMN2 gene. In some embodiments, the activity of the fusion protein (e.g., comprising an adenosine deaminase and a Cas9 domain), or the complex, results in destruction of the stop codon and/or a frameshift mutation. Without wishing to be bound by theory, it is thought that destroying a stop codon (e.g., the 5^{th} codon stop sequence) and/or inducing at least one frameshift mutation result in a more stable SMN protein product, regardless of whether amino acids encoded by exon 7 are included in the protein. For example, in one embodiment, activity of the fusion protein (e.g., comprising an adenosine deaminase and a Cas9 domain), or the complex, results in adenine deamination of the 5^{th} codon stop sequence of a SMN2's exon 8, facilitating the addition of five amino acids at the C-terminal end of the translated SMN protein.

[0442] In some embodiments, the target DNA sequence comprises a sequence associated with an amino acid present in exon 6 of an SMN2 gene. Modification of one amino acid (e.g., S270) using the methods described herein, can be used to slow the rate of SMN protein degradation.

[0443] In some embodiments, the contacting is in vivo in a subject. In some embodiments, the subject has or has been diagnosed with a disease or disorder (e.g., SMA).

[0444] Some embodiments provide methods for using the DNA editing fusion proteins provided herein. In some embodiments, the fusion protein is used to introduce a point mutation into a nucleic acid by deaminating a target nucleobase. In some embodiments, the deamination of the target nucleobase results in the correction of a genetic defect, e.g., in the correction of a point mutation that leads to degradation of the resulting SMN protein. In some embodiments, the genetic defect is associated with a disease or disorder, e.g., SMA.

[0445] In some embodiments, the purposes of the methods provided herein are to restore the full-length gene or to stabilize the resulting protein product via genome editing. The nucleobase editing proteins provided herein can be validated for gene editing-based human therapeutics in vitro, e.g., by correcting a disease-associated mutation in human cell culture. It will be understood by the skilled artisan that the nucleobase editing proteins provided herein, e.g., the fusion proteins comprising a nucleic acid programmable DNA binding protein (e.g., Cas9) and an adenosine deaminase domain can be used to correct any single point G to A or C to T mutation. In the first case, deamination of the mutant A to I corrects the mutation, and in the latter case, deamination of the A that is base-paired with the mutant T, followed by a round of replication or followed by base editing repair activity, corrects the mutation.

[0446] The instant disclosure provides methods for the treatment of a subject diagnosed with a disease associated with or caused by a point mutation that can be corrected by a DNA editing fusion protein provided herein. For example, in some embodiments, a method is provided that comprises administering to a subject having such a disease, e.g., SMA.

[0447] In some embodiments, a fusion protein recognizes canonical PAMs and therefore can correct the pathogenic G to A or C to T mutations with canonical PAMs, e.g., NGG, respectively, in the flanking sequences. For example, Cas9 proteins that recognize canonical PAMs comprise an amino acid sequence that is at least 80%, 85%, 90%, 95%, 97%, 98%, or 99% identical to the amino acid sequence of Streptococcus pyogenes Cas9 as provided by any one of SEQ ID NOs: 5, 8, 10, 12, and 407 or to a fragment thereof comprising the RuvC and HNH domains of any one of SEQ ID NOs: 5, 8, 10, 12, and 407.

[0448] It will be apparent to those of skill in the art that in order to target any of the fusion proteins comprising a Cas9 domain and an adenosine deaminase, as disclosed herein, to a target site, e.g., a site comprising a point mutation to be edited, it is typically necessary to co-express the fusion protein together with a guide RNA, e.g., an sgRNA. As explained in more detail elsewhere herein, a guide RNA typically comprises a tracrRNA framework allowing for Cas9 binding, and a guide sequence, which confers sequence specificity to the Cas9:nucleic acid editing enzyme/domain fusion protein. In some embodiments, the guide RNA sequence 5′-ATTTTGTCTAAAACCCTGTA-3′ (SEQ ID NO: 331), where the nucleotide target is indicated in bold. It should be appreciated that the Ts indicated in the gRNA sequence are uracil (Us) in the RNA sequence. Accordingly, in some embodiments, the gRNA comprises the sequence 5′-AUUUUGUCUAAAACCCUGUA-3′ (SEQ ID NO: 332).

[0449] In some embodiments, the guide sequence of the gRNA comprises a nucleic acid sequence selected from the group consisting of 5′-TTTGTCTAAAACCCTGTAAG-3′ (SEQ ID NO: 333), 5′-TTTTGTCTAAAACCCTGTAA-3′ (SEQ ID NO: 334), 5′-TGATTTTGTCTAAAACCC-3′ (SEQ ID NO: 335), 5′-GATTTTGTCTAAAACCCT-3′ (SEQ ID NO: 336), 5′-ATTTTGTCTAAAACCCTG-3′ (SEQ ID NO: 337), 5′-GTCTAAAACCCTGTAAGG-3′ (SEQ ID NO: 338), and 5′-TCTAAAACCCTGTAAGGA-3′ (SEQ ID NO: 339). As noted previously, the gRNA sequence may comprise uracil (U) instead of thymine (T). Therefore, in some embodiments, the guide sequence of the gRNA comprises a nucleic acid sequence selected from the group consisting of 5′-UUUGUCUAAAACCCUGUAAG-3′ (SEQ ID NO: 340), 5′-UUUUGUCUAAAACCCUGUAA-3′ (SEQ ID NO: 341), 5′-UGAUUUUGUCUAAAACCC-3′ (SEQ ID NO: 342), 5′-GAUUUUGUCUAAAACCCU-3′ (SEQ ID NO: 343), 5′-AUUUUGUCUAAAACCCUG-3′ (SEQ ID NO: 344), 5′-GUCUAAAACCCUGUAAGG-3′ (SEQ ID NO: 345), and 5′-UCUAAAACCCUGUAAGGA-3′ (SEQ ID NO: 346).

[0450] In some embodiments, the gRNA comprises a nucleic acid sequence selected from the group consisting of: 5′-TTTGCAGGAAATGCTGGCAT-3′ (SEQ ID NO: 347), 5′-TTCTCATTTGCAGGAAATGC-3′ (SEQ ID NO: 348), 5′-CATTTAGTGCTGCTCTATGC-3′ (SEQ ID NO: 349), 5′-CAGGAAATGCTGGCATAGAG-3′ (SEQ ID NO: 350), 5′-TTGCAGGAAATGCTGGCATA-3′ (SEQ ID NO: 351), 5′-ATTTGCAGGAAATGCTGGCA-3′ (SEQ ID NO: 352), and 5′-TGGCATAGAGCAGCACTAAA-3′ (SEQ ID NO: 353), where the nucleotide target is indicated in bold. It should be appreciated that the Ts indicated in the gRNA sequence are uracil (Us) in the RNA sequence. Accordingly, in some embodiments, the gRNA comprises a sequence selected from the group consisting of: 5′-UUUGCAGGAAAUGCUGGCAU-3′ (SEQ ID NO: 354), 5′-UUCUCAUUUGCAGGAAAUGC-3′ (SEQ ID NO: 355), 5′-CAUUUAGUGCUGCUCUAUGC-3′ (SEQ ID NO: 356), 5′-CAGGAAAUGCUGGCAUAGAG-3′ (SEQ ID NO: 357), 5′-UUGCAGGAAAUGCUGGCAUA-3′ (SEQ ID NO: 358), 5′-AUUUGCAGGAAAUGCUGGCA-3′ (SEQ ID NO: 359), and 5′-UGGCAUAGAGCAGCACUAAA-3′ (SEQ ID NO: 360).

[0451] In some embodiments, the gRNA comprises the nucleic acid sequence 5′-TGGCATAGAGCAGCACTAAA-3′ (SEQ ID NO: 361), where the nucleotide target is indicated in bold. It should be appreciated that the Ts indicated in the gRNA sequence are uracil (Us) in the RNA sequence. Accordingly, in some embodiments, the gRNA comprises the sequence: 5′-UGGCAUAGAGCAGCACUAAA-3′ (SEQ ID NO: 362).

[0452] Some aspects of the disclosure provide methods for editing a nucleic acid. In some embodiments, the method is a method for editing a nucleobase of a nucleic acid (e.g., a base pair of a double-stranded DNA sequence). In some embodiments, the method comprises the steps of: a) contacting a target region of a nucleic acid (e.g., a double-stranded DNA sequence) with a complex comprising a base editor (e.g., a Cas9 domain fused to an adenosine deaminase) and a guide nucleic acid (e.g., gRNA), wherein the target region comprises a targeted nucleobase pair, b) inducing strand separation of said target region, c) converting a first nucleobase of said target nucleobase pair in a single strand of the target region to a second nucleobase, and d) cutting no more than one strand of said target region, where a third nucleobase complementary to the first nucleobase base is replaced by a fourth nucleobase complementary to the second nucleobase. In some embodiments, the method results in less than 20% indel formation in the nucleic acid. It should be appreciated that in some embodiments, step b is omitted. In some embodiments, the first nucleobase is an adenine. In some embodiments, the second nucleobase is a deaminated adenine, or inosine. In some embodiments, the third nucleobase is a thymine. In some embodiments, the fourth nucleobase is a cytosine. In some embodiments, the method results in less than 19%, 18%, 16%, 14%, 12%, 10%, 8%, 6%, 4%, 2%, 1%, 0.5%, 0.2%, or less than 0.1% indel formation. In some embodiments, the method further comprises replacing the second nucleobase with a fifth nucleobase that is complementary to the fourth nucleobase, thereby generating an intended edited base pair (e.g., A:T to G:C). In some embodiments, the fifth nucleobase is a guanine. In some embodiments, at least 5% of the intended base pairs are edited. In some embodiments, at least 10%, 15%, 20%, 25%, 30%, 35%, 40%, 45%, or 50% of the intended base pairs are edited.

[0453] In some embodiments, the ratio of intended products to unintended products in the target nucleotide is at least 2:1, 5:1, 10:1, 20:1, 30:1, 40:1, 50:1, 60:1, 70:1, 80:1, 90:1, 100:1, or 200:1, or more. In some embodiments, the ratio of intended point mutation to indel formation is greater than 1:1, 10:1, 50:1, 100:1, 500:1, or 1000:1, or more. In some embodiments, the cut single strand (nicked strand) is hybridized to the guide nucleic acid. In some embodiments, the cut single strand is opposite to the strand comprising the first nucleobase. In some embodiments, the base editor comprises a Cas9 domain. In some embodiments, the first base is adenine, and the second base is not a G, C, A, or T. In some embodiments, the second base is inosine. In some embodiments, the first base is adenine. In some embodiments, the second base is not a G, C, A, or T. In some embodiments, the second base is inosine. In some embodiments, the base editor inhibits base excision repair of the edited strand. In some embodiments, the base editor protects or binds the non-edited strand. In some embodiments, the base editor comprises UGI activity. In some embodiments, the base editor comprises a catalytically inactive inosine-specific nuclease. In some embodiments, the base editor comprises nickase activity. In some embodiments, the intended edited base pair is upstream of a PAM site. In some embodiments, the intended edited base pair is 1, 2, 3, 4, 5, 6, 7, 8, 9, 10, 11, 12, 13, 14, 15, 16, 17, 18, 19, or 20 nucleotides upstream of the PAM site. In some embodiments, the intended edited basepair is downstream of a PAM site. In some embodiments, the intended edited base pair is 1, 2, 3, 4, 5, 6, 7, 8, 9, 10, 11, 12, 13, 14, 15, 16, 17, 18, 19, or 20 nucleotides downstream stream of the PAM site. In some embodiments, the method does not require a canonical (e.g., NGG) PAM site. In some embodiments, the nucleobase editor comprises a linker. In some embodiments, the linker is 1-25 amino acids in length. In some embodiments, the linker is 5-20 amino acids in length. In some embodiments, linker is 10, 11, 12, 13, 14, 15, 16, 17, 18, 19, or 20 amino acids in length. In some embodiments, the target region comprises a target window, wherein the target window comprises the target nucleobase pair. In some embodiments, the target window comprises 1-10 nucleotides. In some embodiments, the target window is 1-9, 1-8, 1-7, 1-6, 1-5, 1-4, 1-3, 1-2, or 1 nucleotides in length. In some embodiments, the target window is 1, 2, 3, 4, 5, 6, 7, 8, 9, 10, 11, 12, 13, 14, 15, 16, 17, 18, 19, or 20 nucleotides in length. In some embodiments, the intended edited base pair is within the target window. In some embodiments, the target window comprises the intended edited base pair. In some embodiments, the method is performed using any of the base editors provided herein. In some embodiments, a target window is a deamination window.

[0454] In some embodiments, the disclosure provides methods for editing a nucleotide. In some embodiments, the disclosure provides a method for editing a nucleobase pair of a double-stranded DNA sequence. In some embodiments, the method comprises a) contacting a target region of the double-stranded DNA sequence with a complex comprising a base editor and a guide nucleic acid (e.g., gRNA), where the target region comprises a target nucleobase pair, b) inducing strand separation of said target region, c) converting a first nucleobase of said target nucleobase pair in a single strand of the target region to a second nucleobase, d) cutting no more than one strand of said target region, wherein a third nucleobase complementary to the first nucleobase base is replaced by a fourth nucleobase complementary to the second nucleobase, and the second nucleobase is replaced with a fifth nucleobase that is complementary to the fourth nucleobase, thereby generating an intended edited base pair, wherein the efficiency of generating the intended edited base pair is at least 5%. It should be appreciated that in some embodiments, step b is omitted. In some embodiments, at least 5% of the intended base pairs are edited. In some embodiments, at least 10%, 15%, 20%, 25%, 30%, 35%, 40%, 45%, or 50% of the intended base pairs are edited. In some embodiments, the method causes less than 19%, 18%, 16%, 14%, 12%, 10%, 8%, 6%, 4%, 2%, 1%, 0.5%, 0.2%, or less than 0.1% indel formation. In some embodiments, the ratio of intended product to unintended products at the target nucleotide is at least 2:1, 5:1, 10:1, 20:1, 30:1, 40:1, 50:1, 60:1, 70:1, 80:1, 90:1, 100:1, or 200:1, or more. In some embodiments, the ratio of intended point mutation to indel formation is greater than 1:1, 10:1, 50:1, 100:1, 500:1, or 1000:1, or more. In some embodiments, the cut single strand is hybridized to the guide nucleic acid. In some embodiments, the cut single strand is opposite to the strand comprising the first nucleobase. In some embodiments, the first base is adenine. In some embodiments, the second nucleobase is not G, C, A, or T. In some embodiments, the second base is inosine. In some embodiments, the base editor inhibits base excision repair of the edited strand. In some embodiments, the base editor protects (e.g., form base excision repair) or binds the non-edited strand. In some embodiments, the nucleobase editor comprises UGI activity. In some embodiments, the base editor comprises a catalytically inactive inosine-specific nuclease. In some embodiments, the nucleobase editor comprises nickase activity. In some embodiments, the intended edited base pair is upstream of a PAM site. In some embodiments, the intended edited base pair is 1, 2, 3, 4, 5, 6, 7, 8, 9, 10, 11, 12, 13, 14, 15, 16, 17, 18, 19, or 20 nucleotides upstream of the PAM site. In some embodiments, the intended edited basepair is downstream of a PAM site. In some embodiments, the intended edited base pair is 1, 2, 3, 4, 5, 6, 7, 8, 9, 10, 11, 12, 13, 14, 15, 16, 17, 18, 19, or 20 nucleotides downstream stream of the PAM site. In some embodiments, the method does not require a canonical (e.g., NGG) PAM site. In some embodiments, the nucleobase editor comprises a linker. In some embodiments, the linker is 1-25 amino acids in length. In some embodiments, the linker is 5-20 amino acids in length. In some embodiments, the linker is 10, 11, 12, 13, 14, 15, 16, 17, 18, 19, or 20 amino acids in length. In some embodiments, the target region comprises a target window, wherein the target window comprises the target nucleobase pair. In some embodiments, the target window comprises 1-10 nucleotides. In some embodiments, the target window is 1-9, 1-8, 1-7, 1-6, 1-5, 1-4, 1-3, 1-2, or 1 nucleotides in length. In some embodiments, the target window is 1, 2, 3, 4, 5, 6, 7, 8, 9, 10, 11, 12, 13, 14, 15, 16, 17, 18, 19, or 20 nucleotides in length. In some embodiments, the intended edited base pair occurs within the target window. In some embodiments, the target window comprises the intended edited base pair. In some embodiments, the nucleobase editor is any one of the base editors provided herein.

The instant disclosure provides methods for the treatment of a subject diagnosed with a disease associated with or caused by a point mutation that can be corrected by the editing system provided herein, e.g., spinal muscular atrophy (SMA). For example, in some embodiments, a method is provided that comprises administering to a subject having such a disease, e.g., SMA, a an effective amount of the adenosine base editor and guide RNA described herein that corrects the exon 7 point mutation of SMN2 (e.g., C840T) or modifies a flanking exon (e.g., exon 6 or exon 8) so that the resulting SMN protein product more stable (e.g., is less prone to degradation). In some embodiments, a method for treating a subject is provided which further comprises administering a therapeutic agent to the subject with the adenosine base editor and guide RNA. In some embodiments, the therapeutic agent is an antisense oligonucleotide (e.g., nusinersen). In certain embodiments, the therapeutic agent is risdiplam.

### X. Base Editor Delivery

[0455] In another aspect, the present disclosure provides for the delivery of base editors in vitro and in vivo using various strategies, including on separate vectors using split inteins and as well as direct delivery strategies of the ribonucleoprotein complex (i.e., the base editor complexed to the gRNA and/or the second-site gRNA) using techniques such as electroporation, use of cationic lipid-mediated formulations, and induced endocytosis methods using receptor ligands fused to to the ribonucleoprotein complexes. Any such methods are contemplated herein.

[0456] In some aspects, the invention provides methods comprising delivering one or more base editor-encoding polynucleotides, such as or one or more vectors as described herein encoding one or more components of the base editing system described herein, one or more transcripts thereof, and/or one or proteins transcribed therefrom, to a host cell. In some aspects, the invention further provides cells produced by such methods, and organisms (such as animals, plants, or fungi) comprising or produced from such cells. In some embodiments, a base editor as described herein in combination with (and optionally complexed with) a guide sequence is delivered to a cell. Conventional viral and non-viral based gene transfer methods can be used to introduce nucleic acids in mammalian cells or target tissues. Such methods can be used to administer nucleic acids encoding components of a base editor to cells in culture, or in a host organism. Non-viral vector delivery systems include DNA plasmids, RNA (e.g. a transcript of a vector described herein), naked nucleic acid, and nucleic acid complexed with a delivery vehicle, such as a liposome. Viral vector delivery systems include DNA and RNA viruses, which have either episomal or integrated genomes after delivery to the cell. For a review of gene therapy procedures, see Anderson, Science 256:808-813 (1992); Nabel & Felgner, TIBTECH 11:211-217 (1993); Mitani & Caskey, TIBTECH 11:162-166 (1993); Dillon, TIBTECH 11:167-175 (1993); Miller, Nature 357:455-460 (1992); Van Brunt, Biotechnology 6(10):1149-1154 (1988); Vigne, Restorative Neurology and Neuroscience 8:35-36 (1995); Kremer & Perricaudet, British Medical Bulletin 51(1):31-44 (1995); Haddada et al., in Current Topics in Microbiology and Immunology Doerfler and Bihm (eds) (1995); and Yu et al., Gene Therapy 1:13-26 (1994).

[0457] Methods of non-viral delivery of nucleic acids include lipofection, nucleofection, microinjection, biolistics, virosomes, liposomes, immunoliposomes, polycation or lipid:nucleic acid conjugates, naked DNA, artificial virions, and agent-enhanced uptake of DNA. Lipofection is described in e.g., U.S. Pat. Nos. 5,049,386, 4,946,787; and 4,897,355) and lipofection reagents are sold commercially (e.g., Transfectam™ and Lipofectin™). Cationic and neutral lipids that are suitable for efficient receptor-recognition lipofection of polynucleotides include those of Feigner, WO 91/17424; WO 91/16024. Delivery can be to cells (e.g. in vitro or ex vivo administration) or target tissues (e.g. in vivo administration).

[0458] The preparation of lipid:nucleic acid complexes, including targeted liposomes such as immunolipid complexes, is well known to one of skill in the art (see, e.g., Crystal, Science 270:404-410 (1995); Blaese et al., Cancer Gene Ther. 2:291-297 (1995); Behr et al., Bioconjugate Chem. 5:382-389 (1994); Remy et al., Bioconjugate Chem. 5:647-654 (1994); Gao et al., Gene Therapy 2:710-722 (1995); Ahmad et al., Cancer Res. 52:4817-4820 (1992); U.S. Pat. Nos. 4,186,183, 4,217,344, 4,235,871, 4,261,975, 4,485,054, 4,501,728, 4,774,085, 4,837,028, and 4,946,787).

[0459] The use of RNA or DNA viral based systems for the delivery of nucleic acids take advantage of highly evolved processes for targeting a virus to specific cells in the body and trafficking the viral payload to the nucleus. Viral vectors can be administered directly to patients (in vivo) or they can be used to treat cells in vitro, and the modified cells may optionally be administered to patients (ex vivo). Conventional viral based systems could include retroviral, lentivirus, adenoviral, adeno-associated and herpes simplex virus vectors for gene transfer. Integration in the host genome is possible with the retrovirus, lentivirus, and adeno-associated virus gene transfer methods, often resulting in long term expression of the inserted transgene. Additionally, high transduction efficiencies have been observed in many different cell types and target tissues.

[0460] The tropism of a viruses can be altered by incorporating foreign envelope proteins, expanding the potential target population of target cells. Lentiviral vectors are retroviral vectors that are able to transduce or infect non-dividing cells and typically produce high viral titers. Selection of a retroviral gene transfer system would therefore depend on the target tissue. Retroviral vectors are comprised of cis-acting long terminal repeats with packaging capacity for up to 6-10 kb of foreign sequence. The minimum cis-acting LTRs are sufficient for replication and packaging of the vectors, which are then used to integrate the therapeutic gene into the target cell to provide permanent transgene expression. Widely used retroviral vectors include those based upon murine leukemia virus (MuLV), gibbon ape leukemia virus (GaLV), Simian Immuno deficiency virus (SIV), human immuno deficiency virus (HIV), and combinations thereof (see, e.g., Buchscher et al., J. Virol. 66:2731-2739 (1992); Johann et al., J. Virol. 66:1635-1640 (1992); Sommnerfelt et al., Virol. 176:58-59 (1990); Wilson et al., J. Virol. 63:2374-2378 (1989); Miller et al., J. Virol. 65:2220-2224 (1991); PCT/US94/05700). In applications where transient expression is preferred, adenoviral based systems may be used. Adenoviral based vectors are capable of very high transduction efficiency in many cell types and do not require cell division. With such vectors, high titer and levels of expression have been obtained. This vector can be produced in large quantities in a relatively simple system. Adeno-associated virus (“AAV”) vectors may also be used to transduce cells with target nucleic acids, e.g., in the in vitro production of nucleic acids and peptides, and for in vivo and ex vivo gene therapy procedures (see, e.g., West et al., Virology 160:38-47 (1987); U.S. Pat. No. 4,797,368; WO 93/24641; Kotin, Human Gene Therapy 5:793-801 (1994); Muzyczka, J. Clin. Invest. 94:1351 (1994). Construction of recombinant AAV vectors are described in a number of publications, including U.S. Pat. No. 5,173,414; Tratschin et al., Mol. Cell. Biol. 5:3251-3260 (1985); Tratschin, et al., Mol. Cell. Biol. 4:2072-2081 (1984); Hermonat & Muzyczka, PNAS 81:6466-6470 (1984); and Samulski et al., J. Virol. 63:03822-3828 (1989).

[0461] Packaging cells are typically used to form virus particles that are capable of infecting a host cell. Such cells include 293 cells, which package adenovirus, and ψ2 cells or PA317 cells, which package retrovirus. Viral vectors used in gene therapy are usually generated by producing a cell line that packages a nucleic acid vector into a viral particle. The vectors typically contain the minimal viral sequences required for packaging and subsequent integration into a host, other viral sequences being replaced by an expression cassette for the polynucleotide(s) to be expressed. The missing viral functions are typically supplied in trans by the packaging cell line. For example, AAV vectors used in gene therapy typically only possess ITR sequences from the AAV genome which are required for packaging and integration into the host genome. Viral DNA is packaged in a cell line, which contains a helper plasmid encoding the other AAV genes, namely rep and cap, but lacking ITR sequences. The cell line may also be infected with adenovirus as a helper. The helper virus promotes replication of the AAV vector and expression of AAV genes from the helper plasmid. The helper plasmid is not packaged in significant amounts due to a lack of ITR sequences. Contamination with adenovirus can be reduced by, e.g., heat treatment to which adenovirus is more sensitive than AAV. Additional methods for the delivery of nucleic acids to cells are known to those skilled in the art. See, for example, US20030087817, incorporated herein by reference.

[0462] In various embodiments, the base editor constructs (including, the split-constructs) may be engineered for delivery in one or more rAAV vectors. An rAAV as related to any of the methods and compositions provided herein may be of any serotype including any derivative or pseudotype (e.g., 1, 2, 3, 4, 5, 6, 7, 8, 9, 10, 11, 12, 13, 2/1, 2/5, 2/8, 2/9, 3/1, 3/5, 3/8, or 3/9). An rAAV may comprise a genetic load (i.e., a recombinant nucleic acid vector that expresses a gene of interest, such as a whole or split base editor fusion protein that is carried by the rAAV into a cell) that is to be delivered to a cell. An rAAV may be chimeric.

[0463] As used herein, the serotype of an rAAV refers to the serotype of the capsid proteins of the recombinant virus. Non-limiting examples of derivatives and pseudotypes include rAAV2/1, rAAV2/5, rAAV2/8, rAAV2/9, AAV2-AAV3 hybrid, AAVrh.10, AAVhu.14, AAV3a/3b, AAVrh32.33, AAV-HSC15, AAV-HSC17, AAVhu.37, AAVrh.8, CHt-P6, AAV2.5, AAV6.2, AAV2i8, AAV-HSC15/17, AAVM41, AAV9.45, AAV6(Y445F/Y731F), AAV2.5T, AAV-HAE1/2, AAV clone 32/83, AAVShH10, AAV2 (Y->F), AAV8 (Y733F), AAV2.15, AAV2.4, AAVM41, and AAVr3.45. A non-limiting example of derivatives and pseudotypes that have chimeric VP1 proteins is rAAV2/5-1VP1u, which has the genome of AAV2, capsid backbone of AAV5 and VP1u of AAV1. Other non-limiting example of derivatives and pseudotypes that have chimeric VP1 proteins are rAAV2/5-8VP1u, rAAV2/9-1VP1u, and rAAV2/9-8VP1u.

[0464] AAV derivatives/pseudotypes, and methods of producing such derivatives/pseudotypes are known in the art (see, e.g., Mol Ther. 2012 April; 20(4):699-708. doi: 10.1038/mt.2011.287. Epub 2012 Jan. 24. The AAV vector toolkit: poised at the clinical crossroads. Asokan A1, Schaffer D V, Samulski R J.). Methods for producing and using pseudotyped rAAV vectors are known in the art (see, e.g., Duan et al., J. Virol., 75:7662-7671, 2001; Halbert et al., J. Virol., 74:1524-1532, 2000; Zolotukhin et al., Methods, 28:158-167, 2002; and Auricchio et al., Hum. Molec. Genet., 10:3075-3081, 2001).

[0465] Methods of making or packaging rAAV particles are known in the art and reagents are commercially available (see, e.g., Zolotukhin et al. Production and purification of serotype 1, 2, and 5 recombinant adeno-associated viral vectors. Methods 28 (2002) 158-167; and U.S. Patent Publication Numbers US20070015238 and US20120322861, which are incorporated herein by reference; and plasmids and kits available from ATCC and Cell Biolabs, Inc.). For example, a plasmid comprising a gene of interest may be combined with one or more helper plasmids, e.g., that contain a rep gene (e.g., encoding Rep78, Rep68, Rep52 and Rep40) and a cap gene (encoding VP1, VP2, and VP3, including a modified VP2 region as described herein), and transfected into a recombinant cells such that the rAAV particle can be packaged and subsequently purified.

[0466] Recombinant AAV may comprise a nucleic acid vector, which may comprise at a minimum: (a) one or more heterologous nucleic acid regions comprising a sequence encoding a protein or polypeptide of interest or an RNA of interest (e.g., a siRNA or microRNA), and (b) one or more regions comprising inverted terminal repeat (ITR) sequences (e.g., wild-type ITR sequences or engineered ITR sequences) flanking the one or more nucleic acid regions (e.g., heterologous nucleic acid regions). Herein, heterologous nucleic acid regions comprising a sequence encoding a protein of interest or RNA of interest are referred to as genes of interest.

[0467] Any one of the rAAV particles provided herein may have capsid proteins that have amino acids of different serotypes outside of the VP1u region. In some embodiments, the serotype of the backbone of the VP1 protein is different from the serotype of the ITRs and/or the Rep gene. In some embodiments, the serotype of the backbone of the VP1 capsid protein of a particle is the same as the serotype of the ITRs. In some embodiments, the serotype of the backbone of the VP1 capsid protein of a particle is the same as the serotype of the Rep gene. In some embodiments, capsid proteins of rAAV particles comprise amino acid mutations that result in improved transduction efficiency.

[0468] In some embodiments, the nucleic acid vector comprises one or more regions comprising a sequence that facilitates expression of the nucleic acid (e.g., the heterologous nucleic acid), e.g., expression control sequences operatively linked to the nucleic acid. Numerous such sequences are known in the art. Non-limiting examples of expression control sequences include promoters, insulators, silencers, response elements, introns, enhancers, initiation sites, termination signals, and poly(A) tails. Any combination of such control sequences is contemplated herein (e.g., a promoter and an enhancer).

[0469] Final AAV constructs may incorporate a sequence encoding the gRNA. In other embodiments, the AAV constructs may incorporate a sequence encoding the second-site nicking guide RNA. In still other embodiments, the AAV constructs may incorporate a sequence encoding the second-site nicking guide RNA and a sequence encoding the gRNA.

[0470] In various embodiments, the gRNAs and the second-site nicking guide RNAs can be expressed from an appropriate promoter, such as a human U6 (hU6) promoter, a mouse U6 (mU6) promoter, or other appropriate promoter. The gRNAs and the second-site nicking guide RNAs can be driven by the same promoters or different promoters.

[0471] In some embodiments, a rAAV constructs or the herein compositions are administered to a subject enterally. In some embodiments, a rAAV constructs or the herein compositions are administered to the subject parenterally. In some embodiments, a rAAV particle or the herein compositions are administered to a subject subcutaneously, intraocularly, intravitreally, subretinally, intravenously (IV), intracerebro-ventricularly, intramuscularly, intrathecally (IT), intracisternally, intraperitoneally, via inhalation, topically, or by direct injection to one or more cells, tissues, or organs. In some embodiments, a rAAV particle or the herein compositions are administered to the subject by injection into the hepatic artery or portal vein.

[0472] In other aspects, the base editors can be divided at a split site and provided as two halves of a whole/complete base editor. The two halves can be delivered to cells (e.g., as expressed proteins or on separate expression vectors) and once in contact inside the cell, the two halves form the complete base editor through the self-splicing action of the inteins on each base editor half. Split intein sequences can be engineered into each of the halves of the encoded base editor to facilitate their transplicing inside the cell and the concomitant restoration of the complete, functioning base editor.

[0473] These split intein-based methods overcome several barriers to in vivo delivery. For example, the DNA encoding base editors is larger than the rAAV packaging limit, and so requires special solutions. One such solution is formulating the editor fused to split intein pairs that are packaged into two separate rAAV particles that, when co-delivered to a cell, reconstitute the functional editor protein. Several other special considerations to account for the unique features of base editing are described, including the optimization of second-site nicking targets and properly packaging base editors into virus vectors, including lentiviruses and rAAV.

[0474] In this aspect, the base editors can be divided at a split site and provided as two halves of a whole/complete base editor. The two halves can be delivered to cells (e.g., as expressed proteins or on separate expression vectors) and once in contact inside the cell, the two halves form the complete base editor through the self-splicing action of the inteins on each base editor half Split intein sequences can be engineered into each of the halves of the encoded base editor to facilitate their transplicing inside the cell and the concomitant restoration of the complete, functioning base editor.

[0475] In various embodiments, the base editors may be engineered as two half proteins (i.e., a BE N-terminal half and a BE C-terminal half) by “splitting” the whole base editor as a “split site.” The “split site” refers to the location of insertion of split intein sequences (i.e., the N intein and the C intein) between two adjacent amino acid residues in the base editor. More specifically, the “split site” refers to the location of dividing the whole base editor into two separate halves, wherein in each halve is fused at the split site to either the N intein or the C intein motifs. The split site can be at any suitable location in the base editor fusion protein, but preferably the split site is located at a position that allows for the formation of two half proteins which are appropriately sized for delivery (e.g., by expression vector) and wherein the inteins, which are fused to each half protein at the split site termini, are available to sufficiently interact with one another when one half protein contacts the other half protein inside the cell.

[0476] In some embodiments, the split site is located in the napDNAbp domain. In other embodiments, the split site is located in the RT domain. In other embodiments, the split site is located in a linker that joins the napDNAbp domain and the RT domain.

[0477] In various embodiments, split site design requires finding sites to split and insert an N- and C-terminal intein that are both structurally permissive for purposes of packaging the two half base editor domains into two different AAV genomes. Additionally, intein residues necessary for trans splicing can be incorporated by mutating residues at the N terminus of the C terminal extein or inserting residues that will leave an intein “scar.”

[0478] In various embodiments, using SpCas9 nickase (SEQ ID NO: 29, 1368 amino acids) as an example, the split can between between any two amino acids between 1 and 1368. Preferred splits, however, will be located between the central region of the protein, e.g., from amino acids 50-1250, or from 100-1200, or from 150-1150, or from 200-1100, or from 250-1050, or from 300-1000, or from 350-950, or from 400-900, or from 450-850, or from 500-800, or from 550-750, or from 600-700 of SEQ ID NO: 29. In specific exemplary embodiments, the split site may be between 740/741, or 801/802, or 1010/1011, or 1041/1042. In other embodiments the split site may be between 1/2, 2/3, 3/4, 4/5, 5/6, 6/7, 7/8, 8/9, 9/10, 10/11, 12/13, 14/15, 15/16, 17/18,

19/20 . . . 50/51 . . . 100/101 . . . 200/201 . . . 300/301 . . .
400/401 . . . 500/501 . . . 600/601 . . . 700/701 . . . 800/801 . . . 900/901 . . . 1000/1001 . . . 1100/1101 . . . 1200/1201 . . . 1300/1301 . . . and 1367/1368, including all adjacent pairs of amino acid residues.

[0479] In various embodiments, the split intein sequences can be engineered by from the following intein sequences.

2-4 INTEIN
(SEQ ID NO: 164)
CLAEGTRIFDPVTGTTHRIEDVVDGRKPIHVVAAA
KDGTLLARPVVSWFDQGTRDVIGLRIAGGAIVWAT
PDHKVLTEYGWRAAGELRKGDRVAGPGGSGNSLAL
SLTADQMVSALLDAEPPILYSEYDPTSPFSEASMM
GLLTNLADRELVHMINWAKRVPGFVDLTLHDQAHL
LECAWLEILMIGLVWRSMEHPGKLLFAPNLLLDRN
QGKCVEGMVEIFDMLLATSSRFRMMNLQGEEFVCL
KSIILLNSGVYTFLSSTLKSLEEKDHIHRALDKIT
DTLIHLMAKAGLTLQQQHQRLAQLLLILSHIRHMS
NKGMEHLYSMKYKNVVPLYDLLLEMLDAHRLHAGG
SGASRVQAFADALDDKFLHDMLAEELRYSVIREVL
PTRRARTFDLEVEELHTLVAEGVVVHNC
3-2 INTEIN
(SEQ ID NO: 165)
CLAEGTRIFDPVTGTTHRIEDVVDGRKPIHVVAVA
KDGTLLARPVVSWFDQGTRDVIGLRIAGGAIVWAT
PDHKVLTEYGWRAAGELRKGDRVAGPGGSGNSLAL
SLTADQMVSALLDAEPPILYSEYDPTSPFSEASMM
GLLTNLADRELVHMINWAKRVPGFVDLTLHDQAHL
LECAWLEILMIGLVWRSMEHPGKLLFAPNLLLDRN
QGKCVEGMVEIFDMLLATSSRFRMMNLQGEEFVCL
KSIILLNSGVYTFLSSTLKSLEEKDHIHRALDKIT
DTLIHLMAKAGLTLQQQHQRLAQLLLILSHIRHMS
NKGMEHLYSMKYTNVVPLYDLLLEMLDAHRLHAGG
SGASRVQAFADALDDKFLHDMLAEELRYSVIREVL
PTRRARTFDLEVEELHTLVAEGVVVHNC
30R3-1 INTEIN
(SEQ ID NO: 166)
CLAEGTRIFDPVTGTTHRIEDVVDGRKPIHVVAAA
KDGTLLARPVVSWFDQGTRDVIGLRIAGGATVWAT
PDHKVLTEYGWRAAGELRKGDRVAGPGGSGNSLAL
SLTADQMVSALLDAEPPIPYSEYDPTSPFSEASMM
GLLTNLADRELVHMINWAKRVPGFVDLTLHDQAHL
LECAWLEILMIGLVWRSMEHPGKLLFAPNLLLDRN
QGKCVEGMVEIFDMLLATSSRFRMMNLQGEEFVCL
KSIILLNSGVYTFLSSTLKSLEEKDHIHRALDKIT
DTLIHLMAKAGLTLQQQHQRLAQLLLILSHIRHMS
NKGMEHLYSMKYKNVVPLYDLLLEMLDAHRLHAGG
SGASRVQAFADALDDKFLHDMLAEGLRYSVIREVL
PTRRARTFDLEVEELHTLVAEGVVVHNC
30R3-2 INTEIN
(SEQ ID NO: 167)
CLAEGTRIFDPVTGTTHRIEDVVDGRKPIHVVAAA
KDGTLLARPVVSWFDQGTRDVIGLRIAGGATVWAT
PDHKVLTEYGWRAAGELRKGDRVAGPGGSGNSLAL
SLTADQMVSALLDAEPPILYSEYDPTSPFSEASMM
GLLTNLADRELVHMINWAKRVPGFVDLTLHDQAHL
LECAWLEILMIGLVWRSMEHPGKLLFAPNLLLDRN
QGKCVEGMVEIFDMLLATSSRFRMMNLQGEEFVCL
KSIILLNSGVYTFLSSTLKSLEEKDHIHRALDKIT
DTLIHLMAKAGLTLQQQHQRLAQLLLILSHIRHMS
NKGMEHLYSMKYKNVVPLYDLLLEMLDAHRLHAGG
SGASRVQAFADALDDKFLHDMLAEELRYSVIREVL
PTRRARTFDLEVEELHTLVAEGVVVHNC
30R3-3 INTEIN
(SEQ ID NO: 168)
CLAEGTRIFDPVTGTTHRIEDVVDGRKPIHVVAAA
KDGTLLARPVVSWFDQGTRDVIGLRIAGGATVWAT
PDHKVLTEYGWRAAGELRKGDRVAGPGGSGNSLAL
SLTADQMVSALLDAEPPIPYSEYDPTSPFSEASMM
GLLTNLADRELVHMINWAKRVPGFVDLTLHDQAHL
LECAWLEILMIGLVWRSMEHPGKLLFAPNLLLDRN
QGKCVEGMVEIFDMLLATSSRFRMMNLQGEEFVCL
KSIILLNSGVYTFLSSTLKSLEEKDHIHRALDKIT
DTLIHLMAKAGLTLQQQHQRLAQLLLILSHIRHMS
NKGMEHLYSMKYKNVVPLYDLLLEMLDAHRLHAGG
SGASRVQAFADALDDKFLHDMLAEELRYSVIREVL
PTRRARTFDLEVEELHTLVAEGVVVHNC
37R3-1 INTEIN
((SEQ ID NO: 169)
CLAEGTRIFDPVTGTTHRIEDVVDGRKPIHVVAAA
KDGTLLARPVVSWFDQGTRDVIGLRIAGGATVWAT
PDHKVLTEYGWRAAGELRKGDRVAGPGGSGNSLAL
SLTADQMVSALLDAEPPILYSEYNPTSPFSEASMM
GLLTNLADRELVHMINWAKRVPGFVDLTLHDQAHL
LERAWLEILMIGLVWRSMEHPGKLLFAPNLLLDRN
QGKCVEGMVEIFDMLLATSSRFRMMNLQGEEFVCL
KSIILLNSGVYTFLSSTLKSLEEKDHIHRALDKIT
DTLIHLMAKAGLTLQQQHQRLAQLLLILSHIRHMS
NKGMEHLYSMKYKNVVPLYDLLLEMLDAHRLHAGG
SGASRVQAFADALDDKFLHDMLAEGLRYSVIREVL
PTRRARTFDLEVEELHTLVAEGVVVHNC
37R3-2 INTEIN
(SEQ ID NO: 170)
CLAEGTRIFDPVTGTTHRIEDVVDGRKPIHVVAAA
KDGTLLARPVVSWFDQGTRDVIGLRIAGGAIVWAT
PDHKVLTEYGWRAAGELRKGDRVAGPGGSGNSLAL
SLTADQMVSALLDAEPPILYSEYDPTSPFSEASMM
GLLTNLADRELVHMINWAKRVPGFVDLTLHDQAHL
LERAWLEILMIGLVWRSMEHPGKLLFAPNLLLDRN
QGKCVEGMVEIFDMLLATSSRFRMMNLQGEEFVCL
KSIILLNSGVYTFLSSTLKSLEEKDHIHRALDKIT
DTLIHLMAKAGLTLQQQHQRLAQLLLILSHIRHMS
NKGMEHLYSMKYKNVVPLYDLLLEMLDAHRLHAGG
SGASRVQAFADALDDKFLHDMLAEGLRYSVIREVL
PTRRARTFDLEVEELHTLVAEGVVVHNC
37R3-3 INTEIN
(SEQ ID NO: 171)
CLAEGTRIFDPVTGTTHRIEDVVDGRKPIHVVAVA
KDGTLLARPVVSWFDQGTRDVIGLRIAGGATVWAT
PDHKVLTEYGWRAAGELRKGDRVAGPGGSGNSLAL
SLTADQMVSALLDAEPPILYSEYDPTSPFSEASMM
GLLTNLADRELVHMINWAKRVPGFVDLTLHDQAHL
LERAWLEILMIGLVWRSMEHPGKLLFAPNLLLDRN
QGKCVEGMVEIFDMLLATSSRFRMMNLQGEEFVCL
KSIILLNSGVYTFLSSTLKSLEEKDHIHRALDKIT
DTLIHLMAKAGLTLQQQHQRLAQLLLILSHIRHMS
NKGMEHLYSMKYKNVVPLYDLLLEMLDAHRLHAGG
SGASRVQAFADALDDKFLHDMLAEELRYSVIREVL
PTRRARTFDLEVEELHTLVAEGVVVHNC

[0480] In various embodiments, the split inteins can be used to separately deliver separate portions of a complete Base editor fusion protein to a cell, which upon expression in a cell, become reconstituted as a complete Base editor fusion protein through the trans splicing.

[0481] In some embodiments, the disclosure provides a method of delivering a Base editor fusion protein to a cell, comprising: constructing a first expression vector encoding an N-terminal fragment of the Base editor fusion protein fused to a first split intein sequence; constructing a second expression vector encoding a C-terminal fragment of the Base editor fusion protein fused to a second split intein sequence; delivering the first and second expression vectors to a cell, wherein the N-terminal and C-terminal fragment are reconstituted as the Base editor fusion protein in the cell as a result of trans splicing activity causing self-excision of the first and second split intein sequences.

[0482] In other embodiments, the split site is in the napDNAbp domain.

[0483] In still other embodiments, the split site is in the adenosine deaminase domain.

[0484] In yet other embodiments, the split site is in the linker.

[0485] In other embodiments, the base editors may be delivered by ribonucleoprotein complexes.

[0486] In this aspect, the base editors may be delivered by non-viral delivery strategies involving delivery of a base editor complexed with a gRNA (i.e., a BE ribonucleoprotein complex) by various methods, including electroporation and lipid nanoparticles. Methods of non-viral delivery of nucleic acids include lipofection, nucleofection, microinjection, biolistics, virosomes, liposomes, immunoliposomes, polycation or lipid:nucleic acid conjugates, naked DNA, artificial virions, and agent-enhanced uptake of DNA. Lipofection is described in e.g., U.S. Pat. Nos. 5,049,386, 4,946,787; and 4,897,355) and lipofection reagents are sold commercially (e.g., Transfectam™ and Lipofectin™). Cationic and neutral lipids that are suitable for efficient receptor-recognition lipofection of polynucleotides include those of Feigner, WO 91/17424; WO 91/16024. Delivery can be to cells (e.g. in vitro or ex vivo administration) or target tissues (e.g. in vivo administration).

[0487] The preparation of lipid:nucleic acid complexes, including targeted liposomes such as immunolipid complexes, is well known to one of skill in the art (see, e.g., Crystal, Science 270:404-410 (1995); Blaese et al., Cancer Gene Ther. 2:291-297 (1995); Behr et al., Bioconjugate Chem. 5:382-389 (1994); Remy et al., Bioconjugate Chem. 5:647-654 (1994); Gao et al., Gene Therapy 2:710-722 (1995); Ahmad et al., Cancer Res. 52:4817-4820 (1992); U.S. Pat. Nos. 4,186,183, 4,217,344, 4,235,871, 4,261,975, 4,485,054, 4,501,728, 4,774,085, 4,837,028, and 4,946,787).

### XI. Pharmaceutical Compositions

[0488] Other aspects of the present disclosure relate to pharmaceutical compositions comprising any of the adenosine deaminases, fusion proteins, or the fusion protein-gRNA complexes described herein. The term “pharmaceutical composition”, as used herein, refers to a composition formulated for pharmaceutical use. In some embodiments, the pharmaceutical composition further comprises a pharmaceutically acceptable carrier. In some embodiments, the pharmaceutical composition comprises additional agents (e.g. for specific delivery, increasing half-life, or other therapeutic compounds). In some embodiments, the pharmaceutical composition further comprises an additional therapeutic agent. In some embodiments, the therapeutic agent is an antisense oligonucleotide (e.g., nusinersen). In certain embodiments, the therapeutic agent is risdiplam.

[0489] As used here, the term “pharmaceutically-acceptable carrier” means a pharmaceutically-acceptable material, composition or vehicle, such as a liquid or solid filler, diluent, excipient, manufacturing aid (e.g., lubricant, talc magnesium, calcium or zinc stearate, or steric acid), or solvent encapsulating material, involved in carrying or transporting the compound from one site (e.g., the delivery site) of the body, to another site (e.g., organ, tissue or portion of the body). A pharmaceutically acceptable carrier is “acceptable” in the sense of being compatible with the other ingredients of the formulation and not injurious to the tissue of the subject (e.g., physiologically compatible, sterile, physiologic pH, etc.). Some examples of materials which can serve as pharmaceutically-acceptable carriers include: (1) sugars, such as lactose, glucose and sucrose; (2) starches, such as corn starch and potato starch; (3) cellulose, and its derivatives, such as sodium carboxymethyl cellulose, methylcellulose, ethyl cellulose, microcrystalline cellulose and cellulose acetate; (4) powdered tragacanth; (5) malt; (6) gelatin; (7) lubricating agents, such as magnesium stearate, sodium lauryl sulfate and talc; (8) excipients, such as cocoa butter and suppository waxes; (9) oils, such as peanut oil, cottonseed oil, safflower oil, sesame oil, olive oil, corn oil and soybean oil; (10) glycols, such as propylene glycol; (11) polyols, such as glycerin, sorbitol, mannitol and polyethylene glycol (PEG); (12) esters, such as ethyl oleate and ethyl laurate; (13) agar; (14) buffering agents, such as magnesium hydroxide and aluminum hydroxide; (15) alginic acid; (16) pyrogen-free water; (17) isotonic saline; (18) Ringer's solution; (19) ethyl alcohol; (20) pH buffered solutions; (21) polyesters, polycarbonates and/or polyanhydrides; (22) bulking agents, such as polypeptides and amino acids (23) serum component, such as serum albumin, HDL and LDL; (22) C2-C12 alcohols, such as ethanol; and (23) other non-toxic compatible substances employed in pharmaceutical formulations. Wetting agents, coloring agents, release agents, coating agents, sweetening agents, flavoring agents, perfuming agents, preservative and antioxidants can also be present in the formulation. The terms such as “excipient”, “carrier”, “pharmaceutically acceptable carrier” or the like are used interchangeably herein.

[0490] In some embodiments, the pharmaceutical composition is formulated for delivery to a subject, e.g., for gene editing. Suitable routes of administrating the pharmaceutical composition described herein include, without limitation: topical, subcutaneous, transdermal, intradermal, intralesional, intraarticular, intraperitoneal, intravesical, transmucosal, gingival, intradental, intracochlear, transtympanic, intraorgan, epidural, intrathecal, intramuscular, intravenous, intravascular, intraosseus, periocular, intratumoral, intracerebral, and intracerebroventricular administration.

[0491] In some embodiments, the pharmaceutical composition described herein is administered locally to a diseased site (e.g., tumor site). In some embodiments, the pharmaceutical composition described herein is administered to a subject by injection, by means of a catheter, by means of a suppository, or by means of an implant, the implant being of a porous, non-porous, or gelatinous material, including a membrane, such as a sialastic membrane, or a fiber.

[0492] In other embodiments, the pharmaceutical composition described herein is delivered in a controlled release system. In one embodiment, a pump may be used (see, e.g., Langer, 1990, Science 249:1527-1533; Sefton, 1989, CRC Crit. Ref. Biomed. Eng. 14:201; Buchwald et al., 1980, Surgery 88:507; Saudek et al., 1989, N. Engl. J. Med. 321:574). In another embodiment, polymeric materials can be used. (See, e.g., Medical Applications of Controlled Release (Langer and Wise eds., CRC Press, Boca Raton, Fla., 1974); Controlled Drug Bioavailability, Drug Product Design and Performance (Smolen and Ball eds., Wiley, New York, 1984); Ranger and Peppas, 1983, Macromol. Sci. Rev. Macromol. Chem. 23:61. See also Levy et al., 1985, Science 228:190; During et al., 1989, Ann. Neurol. 25:351; Howard et al., 1989, J. Neurosurg. 71:105). Other controlled release systems are discussed, for example, in Langer, supra.

[0493] In some embodiments, the pharmaceutical composition is formulated in accordance with routine procedures as a composition adapted for intravenous or subcutaneous administration to a subject, e.g., a human. In some embodiments, pharmaceutical compositions for administration by injection are solutions in sterile isotonic aqueous buffer. Where necessary, the pharmaceutical can also include a solubilizing agent and a local anesthetic such as lignocaine to ease pain at the site of the injection. Generally, the ingredients are supplied either separately or mixed together in unit dosage form, for example, as a dry lyophilized powder or water free concentrate in a hermetically sealed container such as an ampoule or sachette indicating the quantity of active agent. Where the pharmaceutical is to be administered by infusion, it can be dispensed with an infusion bottle containing sterile pharmaceutical grade water or saline. Where the pharmaceutical composition is administered by injection, an ampoule of sterile water for injection or saline can be provided so that the ingredients can be mixed prior to administration.

[0494] A pharmaceutical composition for systemic administration may be a liquid, e.g., sterile saline, lactated Ringer's or Hank's solution. In addition, the pharmaceutical composition can be in solid forms and re-dissolved or suspended immediately prior to use. Lyophilized forms are also contemplated.

[0495] A pharmaceutical composition for systemic administration may be a liquid, e.g., sterile saline, lactated Ringer's or Hank's solution. In addition, the pharmaceutical composition can be in solid forms and re-dissolved or suspended immediately prior to use. Lyophilized forms are also contemplated.

[0496] The pharmaceutical composition can be contained within a lipid particle or vesicle, such as a liposome or microcrystal, which is also suitable for parenteral administration. The particles can be of any suitable structure, such as unilamellar or plurilamellar, so long as compositions are contained therein. Compounds can be entrapped in “stabilized plasmid-lipid particles” (SPLP) containing the fusogenic lipid dioleoylphosphatidylethanolamine (DOPE), low levels (5-10 mol %) of cationic lipid, and stabilized by a polyethyleneglycol (PEG) coating (Zhang Y. P. et al., Gene Ther. 1999, 6:1438-47). Positively charged lipids such as N-[1-(2,3-dioleoyloxi)propyl]-N,N,N-trimethyl-amoniummethylsulfate, or “DOTAP,” are particularly preferred for such particles and vesicles. The preparation of such lipid particles is well known. See, e.g., U.S. Pat. Nos. 4,880,635; 4,906,477; 4,911,928; 4,917,951; 4,920,016; and 4,921,757; each of which is incorporated herein by reference.

[0497] The pharmaceutical composition described herein may be administered or packaged as a unit dose, for example. The term “unit dose” when used in reference to a pharmaceutical composition of the present disclosure refers to physically discrete units suitable as unitary dosage for the subject, each unit containing a predetermined quantity of active material calculated to produce the desired therapeutic effect in association with the required diluent; i.e., carrier, or vehicle.

[0498] Further, the pharmaceutical composition can be provided as a pharmaceutical kit comprising (a) a container containing a compound of the invention in lyophilized form and (b) a second container containing a pharmaceutically acceptable diluent (e.g., sterile water) for injection. The pharmaceutically acceptable diluent can be used for reconstitution or dilution of the lyophilized compound of the invention. Optionally associated with such container(s) can be a notice in the form prescribed by a governmental agency regulating the manufacture, use or sale of pharmaceuticals or biological products, which notice reflects approval by the agency of manufacture, use or sale for human administration.

[0499] In another aspect, an article of manufacture containing materials useful for the treatment of the diseases described above is included. In some embodiments, the article of manufacture comprises a container and a label. Suitable containers include, for example, bottles, vials, syringes, and test tubes. The containers may be formed from a variety of materials such as glass or plastic. In some embodiments, the container holds a composition that is effective for treating a disease described herein and may have a sterile access port. For example, the container may be an intravenous solution bag or a vial having a stopper pierceable by a hypodermic injection needle. The active agent in the composition is a compound of the invention. In some embodiments, the label on or associated with the container indicates that the composition is used for treating the disease of choice. The article of manufacture may further comprise a second container comprising a pharmaceutically-acceptable buffer, such as phosphate-buffered saline, Ringer's solution, or dextrose solution. It may further include other materials desirable from a commercial and user standpoint, including other buffers, diluents, filters, needles, syringes, and package inserts with instructions for use.

### XII. Kits, Vectors, Cells

[0500] Some aspects of this disclosure provide kits comprising a nucleic acid construct comprising a nucleotide sequence encoding a base editor, or a component thereof, including a cytidine deaminase, adenosine deaminase, or an napDNAbp, and/or a guide RNA, for editing a target DNA in a cell. In some embodiments, the nucleotide sequence encodes any of the napDNAbps, cytidine deaminases, and/or adenosine deaminases, and/or guide RNAs provided herein. In some embodiments, the nucleotide sequence comprises a heterologous promoter that drives expression of the napDNAbps, cytidine deaminases, and/or adenosine deaminases, and/or guide RNAs described herein. The nucleotide sequence may further comprise one or more heterologous promoters that drive expression of the napDNAbps, cytidine deaminases, and/or adenosine deaminases, and/or guide RNAs, either from the same nucleotide sequence or separate nucleotide sequences.

[0501] In some embodiments, the kit further comprises an expression construct encoding a guide nucleic acid backbone, e.g., a guide RNA backbone, wherein the construct comprises a cloning site positioned to allow the cloning of a nucleic acid sequence identical or complementary to a target sequence into the guide nucleic acid, e.g., guide RNA backbone.

[0502] The disclosure further provides kits comprising a nucleic acid construct, comprising (a) a nucleotide sequence encoding a napDNAbp (e.g., a Cas9 domain) fused to a deaminase, or a base editor comprising a napDNAbp (e.g., Cas9 domain) and a deaminase as provided herein; and (b) a heterologous promoter that drives expression of the sequence of (a). In some embodiments, the kit further comprises an expression construct encoding a guide nucleic acid backbone, (e.g., a guide RNA backbone), wherein the construct comprises a cloning site positioned to allow the cloning of a nucleic acid sequence identical or complementary to a target sequence into the guide nucleic acid (e.g., guide RNA backbone).

[0503] Some embodiments of this disclosure provide cells comprising any of the base editors or complexes provided herein. In some embodiments, the cells comprise nucleotide constructs that encode any of the base editors provided herein. In some embodiments, the cells comprise any of the nucleotides or vectors provided herein. In some embodiments, a host cell is transiently or non-transiently transfected with one or more vectors described herein. In some embodiments, a cell is transfected as it naturally occurs in a subject. In some embodiments, a cell that is transfected is taken from a subject. In some embodiments, the cell is derived from cells taken from a subject, such as a cell line. A wide variety of cell lines for tissue culture are known in the art.

[0504] In some embodiments, a host cell is transiently or non-transiently transfected with one or more vectors described herein. In some embodiments, a cell is transfected as it naturally occurs in a subject. In some embodiments, a cell that is transfected is taken from a subject. In some embodiments, the cell is derived from cells taken from a subject, such as a cell line. A wide variety of cell lines for tissue culture are known in the art. Examples of cell lines include, but are not limited to, C8161, CCRF-CEM, MOLT, mIMCD-3, NHDF, HeLa-S3, Huh1, Huh4, Huh7, HUVEC, HASMC, HEKn, HEKa, MiaPaCell, Panc1, PC-3, TF1, CTLL-2, C1R, Rat6, CV1, RPTE, A10, T24, J82, A375, ARH-77, Calu1, SW480, SW620, SKOV3, SK-UT, CaCo2, P388D1, SEM-K2, WEHI-231, HB56, TIB55, Jurkat, J45.01, LRMB, Bcl-1, BC-3, IC21, DLD2, Raw264.7, NRK, NRK-52E, MRC5, MEF, Hep G2, HeLa B, HeLa T4, COS, COS-1, COS-6, COS-M6A, BS-C-1 monkey kidney epithelial, BALB/3T3 mouse embryo fibroblast, 3T3 Swiss, 3T3-L1, 132-d5 human fetal fibroblasts; 10.1 mouse fibroblasts, 293-T, 3T3, 721, 9L, A2780, A2780ADR, A2780cis, A 172, A20, A253, A431, A-549, ALC, B16, B35, BCP-1 cells, BEAS-2B, bEnd.3, BHK-21, BR 293. BxPC3. C3H-10T1/2, C6/36, Cal-27, CHO, CHO-7, CHO-IR, CHO-K1, CHO-K2, CHO-T, CHO Dhfr−/−, COR-L23, COR-L23/CPR, COR-L23/5010, COR-L23/R23, COS-7, COV-434, CML T1, CMT, CT26, D17, DH82, DU145, DuCaP, EL4, EM2, EM3, EMT6/AR1, EMT6/AR10.0, FM3, H1299, H69, HB54, HB55, HCA2, HEK-293, HeLa, Hepa1c1c7, HL-60, HMEC, HT-29, Jurkat, JY cells, K562 cells, Ku812, KCL22, KG1, KYO1, LNCap, Ma-Mel 1-48, MC-38, MCF-7, MCF-10A, MDA-MB-231, MDA-MB-468, MDA-MB-435, MDCK II, MDCK 11, MOR/0.2R, MONO-MAC 6, MTD-1A, MyEnd, NCI-H69/CPR, NCI-H69/LX10, NCI-H69/LX20, NCI-H69/LX4, NIH-3T3, NALM-1, NW-145, OPCN/OPCT cell lines, Peer, PNT-1A/PNT 2, RenCa, RIN-5F, RMA/RMAS, Saos-2 cells, Sf-9, SkBr3, T2, T-47D, T84, THP1 cell line, U373, U87, U937, VCaP, Vero cells, WM39, WT-49, X63, YAC-1, YAR, and transgenic varieties thereof. Cell lines are available from a variety of sources known to those with skill in the art (see, e.g., the American Type Culture Collection (ATCC) (Manassas, Va.)). In some embodiments, a cell transfected with one or more vectors described herein is used to establish a new cell line comprising one or more vector-derived sequences. In some embodiments, a cell transiently transfected with the components of a CRISPR system as described herein (such as by transient transfection of one or more vectors, or transfection with RNA), and modified through the activity of a CRISPR complex, is used to establish a new cell line comprising cells containing the modification but lacking any other exogenous sequence. In some embodiments, cells transiently or non-transiently transfected with one or more vectors described herein, or cell lines derived from such cells are used in assessing one or more test compounds.

[0505] In some aspects, the present disclosure provides uses of any one of the base editors described herein and a guide RNA targeting this base editor to a target A:T base pair in a nucleic acid molecule in the manufacture of a kit for nucleic acid editing, wherein the nucleic acid editing comprises contacting the nucleic acid molecule with the base editor and guide RNA under conditions suitable for the substitution of the adenine (A) of the A:T nucleobase pair with an guanine (G). In some embodiments of these uses, the nucleic acid molecule is a double-stranded DNA molecule. In some embodiments, the step of contacting of induces separation of the double-stranded DNA at a target region. In some embodiments, the step of contacting further comprises nicking one strand of the double-stranded DNA, wherein the one strand comprises an unmutated strand that comprises the T of the target A:T nucleobase pair.

[0506] In some aspects, the present disclosure provides uses of any one of the base editors described herein and a guide RNA targeting this base editor to a target A:T base pair in a nucleic acid molecule in the manufacture of a kit for evaluating the off-target effects of a base editor, wherein the step of evaluating the off-target effects comprises contacting the base editor with the nucleic acid molecule and determining off-target effects in accordance with any one of the disclosed methods. In some embodiments of these uses, the nucleic acid molecule is a double-stranded DNA molecule. In some embodiments, the step of contacting of induces separation of the double-stranded DNA at a target region. In some embodiments, the step of contacting further comprises nicking one strand of the double-stranded DNA, wherein the one strand comprises an unmutated strand that comprises the T of the target A:T nucleobase pair.

[0507] In some embodiments of the described uses, the step of contacting is performed in vitro. In other embodiments, the step of contacting is performed in vivo. In some embodiments, the step of contacting is performed in a subject (e.g., a human subject or a non-human animal subject). In some embodiments, the step of contacting is performed in a cell, such as a human or non-human animal cell.

[0508] The present disclosure also provides uses of any one of the base editors described herein as a medicament. The present disclosure also provides uses of any one of the complexes of base editors and guide RNAs described herein as a medicament.

[0509] Some aspects of this disclosure provide kits comprising a nucleic acid construct comprising a nucleotide sequence encoding an adenosine deaminase capable of deaminating an adenosine in a deoxyribonucleic acid (DNA) molecule. In some embodiments, the nucleotide sequence encodes any of the adenosine deaminases provided herein. In some embodiments, the nucleotide sequence comprises a heterologous promoter that drives expression of the adenosine deaminase.

[0510] Some aspects of this disclosure provide kits comprising a nucleic acid construct, comprising (a) a nucleotide sequence encoding a napDNAbp (e.g., a Cas9 domain) fused to an adenosine deaminase, or a fusion protein comprising a napDNAbp (e.g., Cas9 domain) and an adenosine deaminase as provided herein; and (b) a heterologous promoter that drives expression of the sequence of (a). In some embodiments, the kit further comprises an expression construct encoding a guide nucleic acid backbone, (e.g., a guide RNA backbone), wherein the construct comprises a cloning site positioned to allow the cloning of a nucleic acid sequence identical or complementary to a target sequence into the guide nucleic acid (e.g., guide RNA backbone).

[0511] Some aspects of this disclosure provide cells comprising any of the adenosine deaminases, fusion proteins, or complexes provided herein. In some embodiments, the cells comprise a nucleotide that encodes any of the adenosine deaminases or fusion proteins provided herein. In some embodiments, the cells comprise any of the nucleotides or vectors provided herein.

[0512] The description of exemplary embodiments of the systems described above is provided for illustration purposes only and not meant to be limiting. Additional systems, e.g., variations of the exemplary systems described in detail above, are also embraced by this disclosure.

[0513] It should be appreciated however, that additional fusion proteins would be apparent to the skilled artisan based on the present disclosure and knowledge in the art.

[0514] The function and advantage of these and other embodiments of the present invention will be more fully understood from the Examples below. The following Examples are intended to illustrate the benefits of the present invention and to describe particular embodiments, but are not intended to exemplify the full scope of the invention. Accordingly, it will be understood that the Examples are not meant to limit the scope of the invention.

### EXAMPLES

[0515] Spinal Muscular Atrophy (SMA) is a progressive motor neuron degeneration disorder that occurs as a result of insufficient survival motor neuron (SMN) protein in spinal motor neurons which leads to atrophy of skeletal muscle and paralysis of the patient. The disease typically involves the status of two SMN-encoding genes, namely, the telomeric SMN1 gene and the almost identical centromeric copy, the SMN2 gene. In SMA, the SMN1 gene is not present due to homozygous deletion (see Cho et al., “A degron created by SMN2 exon 7 skipping is a principle contributor to spinal muscular atrophy severity,” Genes & Development, vol. 24: pp. 438-442, which is incorporated herein by reference). Thus, SMA patients do not typically express SMN1 protein. The centromeric SMN2 gene partially rescues the deleted SMN1 gene but the level of rescue is insufficient because of the presence of a single nucleotide mutation in the splice acceptor site at position 6 within exon 7 that results in the frequent skipping (i.e., ˜80%) of exon 7 during SMN2 post-transcriptional processing (a C-to-T substitution at position 6 of exon 7). Thus, while a small amount of full-size SMN protein is produced from the SMN2 gene, the majority of the SMN2 gene product is truncated in the region corresponding to exon 7. In addition, the defective SMN2 gene product also acquires four amino acids, EMLA (SEQ ID NO: 466), encoded by exon 8 as a new C-terminus of the protein (“the EMLA (SEQ ID NO: 466) tail”). This defective gene product is often referred to as the SMNδ7 product.

[0516] While the SMNδ7 product bears the same function as SMN1, although somewhat diminished, it is rapidly degraded due to the appearance of at least two degron signals formed at the C-terminus of the SMN protein as a result of the exon-7 skipping event. Specifically, it has been reported that the truncated SMNδ7 product signals its own cellular degradation by the proteasome complex due to the presence of (1) the C-terminal portion of the region encoded by exon 6 and (2) the 4-amino acid region encoded by exon 8 (i.e., the EMLA (SEQ ID NO: 466)-tail), both of which function as degron signals in the absence of the exon 7-encoded region^{8, 9}.

[0517] The Examples below describe the design and use of various exemplary base editors (BEs) that are capable of installing precise nucleobase changes in the SMN2 genomic locus which lead to the production of a modified SMN2 protein that avoids or limits proteasome-dependent degradation and retains SMN1-compensatory function. For example, the base editors described herein may be used to eliminate and/or modify one or more degrons in the naturally occurring truncated SMNδ7 product to produce a modified SMN2 product having greater stability. For example, such BE-induced modifications can include, but are not limited to, (1) the removal and/or modification of the C-terminal portion of the region encoded by exon 6 and (2) removal and/or modification of the 4-amino acid region encoded by exon 8 (i.e., the EMLA (SEQ ID NO: 466)-tail) so as to remove or limit their degron activity.

[0518] The modified SMN2 polypeptides are less susceptible to cellular degradation, and thus, show an improved ability to rescue the loss of SMN1 function, which is the hallmark of SMA.

[0519] The disclosure and Examples envision the installation of any suitable nucleobase change that can give rise to a modified SMN2 protein that is able to rescue the homozygous loss of the SMN1 gene using base editors described herein.

[0520] The base editors embrace any type of base editor, and in particular, are exemplified herein using cytidine deaminase base editors (i.e., capable of installing a C-to-T edit) and adenosine base editors (i.e., capable of installing an A-to-G edit) to account for a variety of genetic strategies that result in the production of a modified SMN2 protein that is both stable and functional, and which is capable of rescuing the loss of SMN1 function. Such genetic changes are permanent since they are at the level of genomic change, as opposed to a more transient effect of the use of antisense oligonucleotides (ASO) (e.g., nusinersen, approved in the U.S. as SPINRAZA® in 2016), which are only capable of transiently repairing exon 7 splicing in an SMN2 mRNA transcript.

### Example 1: Base Editing to Address Spinal Muscular Atrophy (SMA)

[0521] Spinal Muscular Atrophy (SMA) is a progressive motor neuron degeneration disorder that SMA occurs as a result of insufficient survival motor neuron (SMN) protein in spinal motor neurons that leads to atrophy of skeletal muscle, and paralysis of the patient.

[0522] The decrease in SMN protein is often a direct result of homozygous loss by deletion of the telomeric SMN1 gene that is responsible for encoding stable full-length SMN protein (FL-SMN) transcripts.¹ As a result, cells rely on the nearly identical centromeric SMN2 gene that contains a single SNP at position 6 of the final exon 7 from a C to T, that results in masking of the acceptor splice site.⁴ The SMN2 pre-mRNA transcript undergoes frequent skipping of exon 7, producing a truncated SMNδ7 mRNA transcript where exon 6 is directly followed by the exon 8 3′-UTR that encodes four amino acids, EMLA (SEQ ID NO: 466) (the EMLA (SEQ ID NO: 466)-tail). Though the amino acids encoded by exon 7 have been lost, the functionality of SMN1 is preserved in the SMNδ7 truncated gene product of SMN2, thereby allowing the SMN2 gene to partially compensate for the loss of SMN1. As such, SMN2 copy numbers are a strong determinate in patients' symptomatic outcome. Nevertheless, both the EMLA (SEQ ID NO: 466)-tail and the now more exposed exon 6 C-terminal amino acid chain independently signal for rapid protein degradation by the proteasome complex,^{8, 9} and together they prompt reduction of SMN protein to levels insufficient for cell survival.

[0523] Here, base editing strategies to target the SMN2 genomic locus for point mutations that affect SMN protein stability, e.g., by correcting the C-to-T transition mutation in position 6 of exon 7 (i.e., the SMA classic disease mutation) or installing another one or more nucleobase edits which have the effect of removing or inactivating a degron, such as the C-terminal portion of the region encoded by exon 6 or the 4-amino acid region encoded by exon 8 (i.e., the EMLA (SEQ ID NO: 466)-tail) so as to remove or limit their degron activity of the disease SNP or otherwise are using adenine base editor (ABE) constructs, are described.

### Repair of C840T in Exon 7

[0524] As noted above, SMN2 comprises C840T at position 6 of exon 7 from a C to T that masks the acceptor splice site. The genomic sequence of the SMN2 exon 7 is presented below (the C→T mutation is bolded and underlined; capitalization represents the exon):

(SEQ ID NO: 363)
Gtgaaacaaaatgctttttaacatccatataaagc
tatctatatatagctatctatatctatatagctat
tttttttaacttcctttattttccttacagGGTTT
TAGACAAAATCAAAAAGAAGGAAGGTGCTCACATT
CCTTAAATTAAggagtaagtctgccagcattatga
aagtgaatcttacttttgtaaaactttatggtttg
tggaaaacaaatgtttttgaacatttaaaaagttc
agatgt

[0525] To repair C840T, different base editing strategies were developed. The SNP was successfully corrected using a circular permutant (CP) adenine base editor.²¹ Canonical ABE-editing occurs between positions 4-8. Transfection experiments in mouse embryonic stem cells (mESCs) derived from the SMA mouse model (Jackson Laboratories 005025) at the human SMN2 transgene were performed. Pairing of the adenine-deaminase with the circular permutant 1040 (CP₁₀₄₁) ABE allowed for higher-position editing at greater efficiency, as shown in FIG. 1. This strategy can alternatively be paired with wildtype Cas9 or other CP variants. In addition, a split-intein version of the CP-ABE was created to allow for packaging and delivery by AAV. As shown in FIG. 1, the split-intein version also showed Exon 7 editing. Exemplary sgRNA sequences are provided below:

CP₁₀₄₁:
5′-ATTTTGTCTAAAACCctgta-3′ (SEQ ID NO: 364)
(5′-AUUUUGUCUAAAACCCUgUa-3′ (SEQ ID NO: 365))
(PAM: agg; SpCas9)
5′-TTTGTCTAAAACCctgtaag-3′ (SEQ ID NO: 366)
(5′-UUUGUCUAAAACCCUgUaag-3′ (SEQ ID NO: 367))
(PAM: gaaaat; saCas9-KKH)
5′-TTTTGTCTAAAACCctgtaa-3′ (SEQ ID NO: 368)
(5′-UUUUGUCUAAAACCCUgUaa-3′ (SEQ ID NO: 369))
(PAM: gga; Cas9-VQR, Cas9-VRQR, Cas9-VRER,
Cas9-NG)
5′-TGATTTTGTCTAAAACCC-3′ (SEQ ID NO: 370)
(5′-UGAUUUUGUCUAAAACCC-3′ (SEQ ID NO: 371))
(PAM: TTTT; CPF1)
5′-GATTTTGTCTAAAACCCT-3′ (SEQ ID NO: 372)
(5′-GAUUUUGUCUAAAACCCU-3′ (SEQ ID NO: 373))
(PAM: TTTT; CPF1)
5′-ATTTTGTCTAAAACCCTG-3′ (SEQ ID NO: 374)
(5′-AUUUUGUCUAAAACCCUG-3′ (SEQ ID NO: 375))
(PAM: GTTT; CPF1)
5′-GTCTAAAACCCTGTAAGG-3′ (SEQ ID NO: 376)
(5′-GUCUAAAACCCUGUAAGG-3′ (SEQ ID NO: 377))
(PAM: TTTT; CPF1)
5′-TCTAAAACCCTGTAAGGA-3′ (SEQ ID NO: 378)
(5′-UCUAAAACCCUGUAAGGA-3′ (SEQ ID NO: 379))
(PAM: GTTT; CPF1)

### Improved Stability of SMN Protein Products (Exon 8)

[0526] Using the inDelphi Cas9 outcome predictive algorithm²² sgRNAs that were predicted facilitate SpCas9 cutting of the start of exon 8, were found. These sgRNAs were expected to generate allelic outcomes that would result in more stable SMN protein products (FIGS. 2A, 2B). Transfection experiments in mouse embryonic stem cells (mESCs) derived from the SMA mouse model (Jackson Laboratories 005025) at the human SMN2 transgene were performed (FIG. 2C). The designed sgRNAs fit the criteria that the majority of products do not disturb the splice junction and allow for 5<codons before a STOP codon is reached,⁹ either destroying the 5th codon STOP sequence, inducing frameshifts, or combinations thereof. sgRNA targeting with Cas9-NG enables high-efficiency editing; however, this strategy can alternatively be paired with other Cas9 variants that can recognize “NGA”-PAM sequences. The exon 8 SNM2 genomic sequence is provided below. The sequence of the exon is capitalized; the stop codes are bolded.

(SEQ ID NO: 380)
CtctggttctaatttctcatttgcagGAAATGC
TGGCATAGAGCAGCACTAAATGACACCACTAA
AGAAACGATCA

[0527] Exemplary sgRNA sequences that modify exon 8 nuclease are provided below:

5′-TTTGCAGGAAATGCTGGCAT-3′ (SEQ ID NO: 381)
(5′-UUUGCAGGAAAUGCUGGCAU-3′ (SEQ ID NO: 382))
(PAM: aga; Cas9-VQR, Cas9-VRQR,
Cas9-VRER, Cas9-NG)
5′-TTCTCATTTGCAGGAAATGC-3′ (SEQ ID NO: 383)
(5′-UUCUCAUUUGCAGGAAAUGC-3′ (SEQ ID NO: 384))
(PAM: tgg; SpCas9)
5′-CATTTAGTGCTGCTCTATGC-3′ (SEQ ID NO: 385)
(5′-CAUUUAGUGCUGCUCUAUGC-3′ (SEQ ID NO: 386))
(PAM: CAG; SpCas9)
5′-CAGGAAATGCTGGCATAGAG-3′ (SEQ ID NO: 387)
(5′-CAGGAAAUGCUGGCAUAGAG-3′ (SEQ ID NO: 388))
(PAM: CAG; SpCas9)
5′-TTGCAGGAAATGCTGGCATA-3′ (SEQ ID NO: 389)
(5′-UUGCAGGAAAUGCUGGCAUA-3′ (SEQ ID NO: 390))
(PAM: GAG; SpCas9)
5′-ATTTGCAGGAAATGCTGGCA-3′ (SEQ ID NO: 391)
(5′-AUUUGCAGGAAAUGCUGGCA-3′ (SEQ ID NO: 392))
(PAM: TAG; SpCas9)

[0528] An exemplary sequence for exon 8 base editing modification is given below. In this approach, adenine deamination of the 5^{th} codon stop sequence facilitates the addition of 5 amino acids at the C-terminal of the translated protein (e.g., stabilizes the translated protein).

5′-TGGCATAGAGCAGCACTAAA-3′ (SEQ ID NO: 393)
(5′-UGGCAUAGAGCAGCACUAAA-3′ (SEQ ID NO: 394))
(PAM: TGA; Cas9-VQR, Cas9-VRQR, Cas9-VRER,
Cas9-NG)

### Improved Stability of SMN Protein Products (Exon 6)

[0529] Modification of the S270 amino acid of SMN2 derived proteins has previously been shown to slow the rate of protein degradation.⁹ An ABE was designed to target the S270 amino acid codon of exon 6, decreasing the rate of SMA protein degradation.

[0530] The SMN2 exon 6 genomic sequence is provided below. The sequence of the exon is capitalized and the S270 codon is bolded.

(SEQ ID NO: 395)
CTTTGGGAAGTATGTTAATTTCATGGTACATGAGTGGCTATCA
TACTGGCTATTATATGgtaagtaatcactcagcatcttttcct
gacaatttttttgtagttatgtgactttgttttgtaaattt

[0531] An exemplary sequence for ABE-mediated codon-switching in order to increase the stability of SMN2-derived proteins is provided below.

5′-TACATGAGTGGCTATCATAC-3′ (SEQ ID NO: 396)
(5′-UACAUGAGUGGCUAUCAUAC-3′ (SEQ ID NO: 397))
(PAM: TGG; SpCas9)

### Example 2: Base Editing to Address Spinal Muscular Atrophy (SMA)

[0532] Spinal Muscular Atrophy (SMA) is a progressive motor neuron degeneration disorder that arises in infants, and it is the leading hereditary childhood disease to result in fatality [1,2]. SMA occurs as a result of insufficient survival motor neuron (SMN) protein in spinal motor neurons that leads to atrophy of skeletal muscle, and paralysis of the patient. The SMN-complex is responsible for the generation of snRNPs, and as such SMN plays an important role in pre-mRNA processing [3] however, the comprehensive molecular cascade leading to cellular degeneration initiated by SMN loss has not yet been elucidated.

[0533] The decrease in SMN protein is often a direct result of homozygous loss by deletion of the telomeric SMN1 gene that is responsible for encoding stable full-length SMN protein (FL-SMN) transcripts [1]. As a result, cells rely on the nearly identical centromeric SMN2 gene that contains a single SNP at position 6 of the final exon 7 from a C to T, that results in masking of the acceptor splice site [4]. The SMN2 pre-mRNA transcript undergoes frequent skipping of exon 7, producing a truncated SMNδ7 mRNA transcript where exon 6 is directly followed by the exon 8 3′-UTR that encodes four amino acids, EMLA (SEQ ID NO: 466). Though the 27 amino acids encoded by exon 7 have been lost, the functionality of FL-SMN is preserved in SMNδ7, thereby allowing SMN2 to partially compensate for the loss of SMN1. As such, SMN2 copy numbers are a strong determinate in patients' symptomatic outcome [5-7]. Nevertheless, both the EMLA (SEQ ID NO: 466)-tail and the now more exposed exon 6 C-terminal amino acid-chain independently signal for rapid protein degradation by the proteasome complex [8,9], and together they prompt reduction of SMN protein to levels insufficient for cell survival.

[0534] The genetics of SMA are well understood and lend well to genetic therapy strategies. Antisense oligonucleotides (ASO) encoding short sequences that target SMN2 exon 7 splicing regulatory sites aid in the recruitment of the splicing machinery to the acceptor splice site to create corrected SMN mRNA transcripts that no longer translate into unstable proteins [10,11]. While this method has proved effective in upregulating SMN even in vivo in mouse models of SMA, the post-transcriptional modification of ASOs is only transient. Genetic modification that corrects SMN protein stability would lead to a lasting cure for SMA once accomplished.

[0535] The recent dawning of targeted CRISPR/Cas9 mediated gene editing technologies has accelerated the course of clinical gene therapy research, and a great deal of focus has gone towards the development of genomic modification strategies as medical treatments for genetic disorders [12-16]. Most commonly, SMN2 transcript correction relies on the reversal of the early exon 7 SNP to that of SMN1. Permanent correction of SMN2 can be achieved through the inefficient process of homology directed repair (HDR) after induction of a DNA double stranded break at the genomic site of the exon 7 SNP [17], however, while CRISPR/Cas9 mediated HR can be performed at high efficiency in cell culture of rapidly dividing cells [18] it is not known if post-mitotic neurons are capable of HDR to any degree [19]. Base editing enzymes coupled to CRISPR/Cas9 allow for the specific conversion of one nucleotide to another in a site directed manner and are therefore uniquely suited to treat SNP based monogenic disorders [20].

[0536] To this end, we are devising base editing strategies to target the SMN2 genomic locus for point mutations that affect SMN protein stability. Below, we list sgRNAs targeting CRISPR/Cas9 base editing protein complexes to SMN2 genomic sites of interest.

### References for Example 2

[0537] 1. Lefebvre et al. Cell 80, 155-65 (1995)
[0538] 2. Pearn et al. Lancet 1, 919-922 (1980)
[0539] 3. Schrank et al. PNAS 94, 9920-5 (1997)
[0540] 4. Cartegni et al. Am J Hum Genet 78, 63-77 (2006)
[0541] 5. Wirth et al. Hum Genet 119, 422-8 (2006
[0542] 6. Talbot et al. Semin Neurol 21 (189-197 (2001)
[0543] 7. Murray et al. Hum Mol Genet 17, 949-62 (2008)
[0544] 8. Chang et al. Neurochem Int 45, 1107-12 (2004)
[0545] 9. Cho et al. Genes Dev 24, 438-42 (2010)
[0546] 10. Sing et al. Mol Cell Biol 26, 1333-46 (2006)
[0547] 11. Porensky et al. Hum Mol Genet 21, 1625-38 (2012)
[0548] 12. Cong et al. Science 339, 819-23 (2013)
[0549] 13. Ran et al. Nature 520, 186-90 (2015)
[0550] 14. Long et al. Science 5725 (2015)
[0551] 15. Tabebordbar et al. Science 5177, 1-9 (2015)
[0552] 16. Nelson et al. Science 5143m 1-8 (2015)
[0553] 17. Corti et al. Sci Transl Med 4, 165ra162 (2012)
[0554] 18. Arbab et al. Stem Cell Reports 5, 1-10 (2015)
[0555] 19. Iyama et al. SNA Repair (Amst). 12, 620-626 (2013)
[0556] 20. Komor et al. Science 533, 420-424 (2016)

### Results

[0557] Design of sgRNA's to target base editing enzymes to the genomic region of intron 6 to exon 8 of the human SMN2 gene, as a means of upregulating the level of SMN protein.

[0558] A. Genomic Region Surrounding Exon 7:

Exon in CAPS
C->T mutation in red
Regions affecting Exon 7 splicing are underlined
gtgaaacaaaatgctttttaacatccatataaagctatctatatatagctatct
atatctatatagctattttttttaacttcctttattttccttacagGGTTT [symbol] AG
ACAAAATCAAAAAGAAGGAAGGTGCTCACATTCCTTAAATTAAggagtaagtct
gccagcattatgaaagtgaatcttacttttgtaaaactttatggtttgtggaa
aacaaatgtttttgaacatttaaaaagttcagatgt
(SEQ ID NO: 363)

| | |
|---|---|
| 1. PAM: agg (NGG) | Species:spCas^{WT} |

sgRNA: 5′-G AAACCctgtaaggaaaataa-3′ (SEQ ID NO: 414) (Rv)

| | | | | |
|---|---|---|---|---|
| Site 1 Editor: | C to T | Base: ⁻¹G | Position: 5 | Notes: |
| Site 2 Editor: | C to T | Base: ⁻¹G | Position: 6 | Notes: |
| 2. PAM: [symbol] aaat (NNNRRT) | Species: saCas^{mut} (Rv) | | | |

sgRNA: 5′-G TTTGTCTAAAACCctgtaag-3′ (SEQ ID NO: 415) (Rv)

| | | | | |
|---|---|---|---|---|
| Site 1 Editor: | C to T | Base: ⁸G | Position: 6 | Notes: SAME AS |
| | | | | SG3, BELOW. |
| 3. PAM: gga (NGA) | Species: spCas^{mut1} (Rv) | | | |

sgRNA: 5′-GTTTTGTCTAAAACCctgtaa-3′ (SEQ ID NO: 416) (Rv)

| | | | | |
|---|---|---|---|---|
| Site 1 Editor: | C to T | Base: ⁸G | Position: 7 | Notes: SAME AS |
| 4. PAM: TGA (NGA) | Species: spCas^{mut1} (Rv) | | | SG2, ABOVE. |

sgRNA: 5′-GTGAGCACCTTCCTTCTTTT-3′(SEQ ID NO: 417) (Rv)

| | | | | |
|---|---|---|---|---|
| Site 1 Editor: | C to T | Base: ³⁰G | Position: 8 | Notes: |
| Site 2 Editor: | C to T | Base: ³²G | Position: 6 | Notes: |
| Site 3 Editor: | A to G | Base: ³⁴T | Position: 4 | Notes: |
| 5. PAM: TT [symbol] T (NNNRRT) | Species: (Rv) | | | |

sgRNA: 5′-GATGTGAGCACCTTCCTTCTT-3′(SEQ ID NO: 418) (Rv)

| | | | | |
|---|---|---|---|---|
| Site 1 Editor: | C to T | Base: ³²G | Position: 8 | Notes: |
| Site 2 Editor: | A to G | Base: ³⁴T | Position: 6 | Notes: |
| 6. PAM: TGA (NGA) | Species: spCas^{mut1} (Rv) | | | |

sgRNA: 5′-GactccTTAATTTAAGGAATG-3′ (SEQ ID NO: 419) (Rv)

| | | | | |
|---|---|---|---|---|
| Site 1 Editor: | C to T | Base: ⁵⁰T | Position: 7 | Notes: |
| 7. PAM: [symbol] AAT (NNNRRT) | Species: saCas^{mut} | | | |

sgRNA: 5′-G cagacttactccTTAATTTA-3′ (SEQ ID NO: 420) (Rv)

| | | | | |
|---|---|---|---|---|
| Site 1 Editor: | C to T | Base: ⁶⁰G | Position: 5 | Notes: |
| Site 2 Editor: | A to G | Base: ⁶¹T | Position: 4 | Notes: SAME AS |
| | | | | SG8, BELOW |
| 8. PAM: [symbol] (NGG) | Species: spCas^{WT} | | | |

sgRNA: 5′-G cagacttactccTTAATTTA-3′ (SEQ ID NO: 421) (Rv)

| | | | | |
|---|---|---|---|---|
| Site 1 Editor: | C to T | Base: ⁱ⁵G | Position: 5 | Notes: SAME AS |
| | | | | SG7, ABOVE |
| Site 2 Editor: | A to G | Base: ⁱ⁶T | Position: 4 | Notes: |
| 9. PAM: CTTAAT (NNNRRT) | Species: saCas^{mut} | | | |

sgRNA: 5′-G taatgctggcagacttactc-3′ (SEQ ID NO: 422)(Rv)

| | | | | |
|---|---|---|---|---|
| Site 1 Editor: | C to T | Base: ⁱ¹³G | Position: 6 | Notes: |
| 10. PAM: aga (NGA) | Species: spCas^{mut} | | | |

sgRNA: 5′-G ttcactttcataatgctggc-3′ (SEQ ID NO: 423) (Rv)

| | | | | |
|---|---|---|---|---|
| Site 1 Editor: | C to T | Base: ⁱ²⁴G | Position: 5 | Notes: |
| Site 2 Editor: | A to G | Base: ⁱ²⁵T | Position: 4 | Notes: |
| 11. PAM: tgg (NGG) | Species: spCas^{WT} (Rv) | | | |

sgRNA: 5′-G aagattcactttcataatgc-3′ (SEQ ID NO: 424) (Rv)

| | | | | |
|---|---|---|---|---|
| Site 1 Editor: | C to T | Base: ⁱ²⁶G | Position: 7 | Notes: |
| Site 2 Editor: | A to G | Base: ⁱ²⁹T | Position: 4 | Notes: |
| 12. PAM: cataat (NNNRRT) | Species: saCas^{mut} | | | |

sgRNA: 5′-G acaaaagtaagattcacttt-3′ (SEQ ID NO: 425) (Rv)

| | | | | |
|---|---|---|---|---|
| Site 1 Editor: | A to G | Base: ⁱ³⁶T | Position: 5 | Notes: |
| Site 2 Editor: | A to G | Base: ⁱ³⁷T | Position: 4 | Notes: |
| 13. PAM: agG (NGG) | Species: spCas^{WT} | | | |

sgRNA: 5′-G acttcctttattttccttac-3′ (SEQ ID NO: 426) (Fw)

| | | | | |
|---|---|---|---|---|
| Site 1 Editor: | C to T | Base: ⁻¹⁸C | Position: 5 | Notes: |
| Site 2 Editor: | C to T | Base: ⁻¹⁷C | Position: 6 | Notes: |
| 14. PAM: [symbol] GT(NNNRRT) | Species: saCas^{mut} | | | |

sgRNA: 5′-G aacttcctttattttcctta-3′ (SEQ ID NO: 427) (Fw)

| | | | | |
|---|---|---|---|---|
| Site 1 Editor: | C to T | Base: ⁻¹⁸C | Position: 6 | Notes: |
| Site 2 Editor: | C to T | Base: ⁻¹⁷C | Position: 7 | Notes: |
| 15. PAM: CAAAAT (NNNRRT) | Species: saCas^{mut} | | | |

sgRNA: 5′-G tttccttacagGGTTTTAGA-3′ (SEQ ID NO: 428) (Fw)

| | | | | |
|---|---|---|---|---|
| Site 1 Editor: | C to T | Base: ⁻⁷C | Position: 5 | Notes: |
| 16. PAM: AGG (NGG) | Species: spCas^{WT} | | | |

sgRNA: 5′-G TTTAGACAAAATCAAAAAGA-3′ (SEQ ID NO: 429) (Fw)

| | | | | |
|---|---|---|---|---|
| Site 1 Editor: | A to G | Base: ⁷A | Position: 4 | Notes: |
| Site 2 Editor: | A to G | Base: ⁹A | Position: 6 | Notes: |
| Site 3 Editor: | C to T | Base: ¹⁰C | Position: 7 | Notes: |
| 17. PAM: GGA (NGA) | Species: spCas^{WT} | | | |

sgRNA: 5′-G TTAGACAAAATCAAAAAGAA-3′ (SEQ ID NO: 430) (Fw)

| | | | | |
|---|---|---|---|---|
| Site 1 Editor: | A to G | Base: ⁹A | Position: 5 | Notes: |
| Site 2 Editor: | C to T | Base: ¹⁰C | Position: 6 | Notes: |
| 18. PAM: GA [symbol] T (NNNRRT) | Species: saCas^{mut} | | | |

sgRNA: 5′-G TAGACAAAATCAAAAAGAAG-3′ (SEQ ID NO: 431)(Fw)

| | | | | |
|---|---|---|---|---|
| Site 1 Editor: | A to G | Base: ⁹A | Position: 4 | Notes: |
| Site 2 Editor: | C to T | Base: ¹⁰C | Position: 5 | Notes: |
| Site 3 Editor: | A to G | Base: ^{I1}A | Position: 6 | Notes: |
| 19. PAM: AGG (NGG) | Species: spCas^{WT} | | | |

sgRNA: 5′-GACAAAATCAAAAAGAAGGA-3′ (SEQ ID NO: 432) (Fw)

| | | | | |
|---|---|---|---|---|
| Site 1 Editor: | A to G | Base: ¹¹A | Position: 4 | Notes: |
| Site 2 Editor: | A to G | Base: ¹²A | Position: 5 | Notes: |
| Site 3 Editor: | A to G | Base: ¹³A | Position: 6 | Notes: |
| 20. PAM: TTAAAT(NNNRRT) | Species: | | | |

sgRNA: 5′-G AAGGAAGGTGCTCACATTCC-3′ (SEQ ID NO: 433) (Fw)

| | | | | |
|---|---|---|---|---|
| Site 1 Editor: | A to G | Base: ²⁷A | Position: 4 | Notes: |
| Site 2 Editor: | A to G | Base: ²⁸A | Position: 5 | Notes: |
| 21. PAM: Agg (NGG) | Species: spCas^{WT} | | | |

sgRNA: 5′-G TGCTCACATTCCTTAAATTA-3′ (SEQ ID NO: 434) (Fw)

| | | | | |
|---|---|---|---|---|
| Site 1 Editor: | C to T | Base: ³⁵C | Position: 5 | Notes: |
| Site 2 Editor: | A to G | Base: ³⁶A | Position: 6 | Notes: |
| Site 3 Editor: | C to T | Base: ³⁷C | Position: 7 | Notes: same |
| | | | | as SG23, |
| | | | | BELOW. OVERLAP |
| | | | | WITH SG22 |
| 22. PAM: gga (NGA) | Species: spCas^{mut} | | | |

sgRNA: 5′-GTGCTCACATTCCTTAAATT-3′ (SEQ ID NO: 435) (Fw)

| | | | | |
|---|---|---|---|---|
| Site 1 Editor: | C to T | Base: ³⁵C | Position: 6 | Notes: |
| Site 2 Editor: | C to T | Base: ³⁷C | Position: 8 | Notes: OVERLAP |
| | | | | WITH 21 AND 23 |
| 23. PAM: Aggagt (NNGRRT) | Species: saCas^{WT} | | | |

sgRNA: 5′-G TGCTCACATTCCTTAAATTA-3′ (SEQ ID NO: 436) (Fw)

| | | | | |
|---|---|---|---|---|
| Site 1 Editor: | C to T | Base: ³⁵C | Position: 5 | Notes: |
| Site 2 Editor: | A to G | Base: ³⁶A | Position: 6 | Notes: |
| Site 3 Editor: | C to T | Base: ³⁷C | Position: 7 | Notes: |
| | | | | same as SG21, |
| | | | | ABOVE. OVERLAP |
| | | | | WITH SG22 |
| 24. PAM: gtaagt (NNNRRT) | Species: saCas^{mut} | | | |

sgRNA: 5′-G CACATTCCTTAAATTAAgga-3′ (SEQ ID NO: 437)(Fw)

| | | | | |
|---|---|---|---|---|
| Site 1 Editor: | A to G | Base: ³⁸A | Position: 4 | Notes: |
| Site 2 Editor: | C to T | Base: ⁴¹C | Position: 7 | Notes: |
| 25. PAM: tga (NGA) | Species: spCas^{mut} | | | |

sgRNA: 5′-gagtaagtctgccagcatta-3′ (SEQ ID NO: 438) (Fw)

| | | | | |
|---|---|---|---|---|
| Site 1 Editor: | A to G | Base: ¹³A | Position: 5 | Notes: |
| Site 2 Editor: | A to G | Base: ¹⁴A | Position: 6 | Notes: |
| 26. PAM: gaaagt (NNNRRT) | Species: saCas^{mut} | | | |

sgRNA: 5′-agtaagtctgccagcattat-3′ (SEQ ID NO: 439) (Fw)

| | | | | |
|---|---|---|---|---|
| Site 1 Editor: | A to G | Base: ¹³A | Position: 4 | Notes: |
| Site 2 Editor: | A to G | Base: ¹⁴A | Position: 5 | Notes: |
| Site 3 Editor: | C to T | Base: ¹⁷C | Position: 8 | Notes: |
| 27. PAM: tga (NGA) | Species: spCas^{mut} | | | |

sgRNA: 5′-gtctgccagcattatgaaag-3′ (SEQ ID NO: 440) (Fw)

| | | | | |
|---|---|---|---|---|
| Site 1 Editor: | C to T | Base: ⁱ¹⁰C | Position: 6 | Notes: |
| Site 2 Editor: | C to T | Base: ⁱ¹¹C | Position: 7 | Notes: SAME |
| | | | | AS SG28 |
| 28. PAM: gtgaat (NNNRRT) | Species: saCas^{mut} | | | |

sgRNA: 5′-G agtctgccagcattatgaaa-3′ (SEQ ID NO: 441)(Fw)

| | | | | |
|---|---|---|---|---|
| Site 1 Editor: | C to T | Base: ⁱ¹⁰C | Position: 7 | Notes: |
| Site 2 Editor: | C to T | Base: ⁱ¹¹C | Position: 8 | Notes: |
| | | | | SAME AS SG27 |
| 29. PAM: tgg (NGG) | Species: spCas^{WT} | | | |

sgRNA: 5′-G cttacttttgtaaaacttta-3′ (SEQ ID NO: 442) (Fw)

| | | | | |
|---|---|---|---|---|
| Site 1 Editor: | A to G | Base: ¹³³A | Position: 4 | Notes: |
| Site 2 Editor: | C to T | Base: ¹³⁴C | Position: 5 | Notes: |
| 30. PAM: tgg (NGG) | Species: spCas^{WT} | | | |

sgRNA: 5′-G ttgtaaaactttatggtttg-3′ (SEQ ID NO: 443) (Fw)

| | | | | |
|---|---|---|---|---|
| Site 1 Editor: | A to G | Base: ¹⁴¹A | Position: 5 | Notes: |
| Site 1 Editor: | A to G | Base: ¹⁴²A | Position: 6 | Notes: |

[0559] B. Genomic Region Surrounding Exon 8:

Exon in CAPS
STOP codons in red
aagcctctggttctaatttctcatttgcagGAAATGCTGGCA [symbol]
AGCAGCACTAAA [symbol] CACCAC [symbol] [symbol] AGAAACGAT
CAG (SEQ ID NO: 444)

| | |
|---|---|
| 31. PAM: aga (NGA) | Species: spCas^{mut} |

sgRNA: 5′-G TTTCctgcaaatgagaaatt-3′ (SEQ ID NO: 445) (Rv)

| | | | | |
|---|---|---|---|---|
| Site 1 Editor: | C to T | Base: ^{E8-1}G | Position: 8 | Notes: |
| Site 2 Editor: | C to T | Base: ^{E4}T | Position: 5 | Notes: |

| | |
|---|---|
| 32. PAM: agaaat (NNNRRT) | Species: saCas^{mut} |

sgRNA: 5′-GCCAGCATTTCctgcaaatg-3′ (SEQ ID NO: 446) (Rv)

| | | | | |
|---|---|---|---|---|
| Site 1 Editor: | C to T | Base: ⁶G | Position: 6 | Notes: |
| Site 2 Editor: | A to G | Base: ⁸T | Position: 4 | Notes: |
| | | | | overlap with 33 |

| | |
|---|---|
| 33. PAM: tga (NGA) | Species: spCas^{mut} |

sgRNA: 5′-G ATGCCAGCATTTCctgcaaa-3′ (SEQ ID NO: 447) (Rv)

| | | | | |
|---|---|---|---|---|
| Site 1 Editor: | C to T | Base: ⁶G | Position: 8 | Notes: |
| Site 2 Editor: | A to G | Base: ⁸T | Position: 6 | Notes: |
| Site 3 Editor: | C to T | Base: ⁹G | Position: 5 | Notes: |
| | | | | overlap with 32 |

| | |
|---|---|
| 34. PAM: gcaaat (NNNRRT) | Species: saCas^{mut} |

sgRNA: 5′-GCTCTATGCCAGCATTTCct-3′ (SEQ ID NO: 448) (Rv)

| | | | | |
|---|---|---|---|---|
| Site 1 Editor: | A to G | Base: ¹³T | Position: 6 | Notes: |
| 35. PAM: CTAAA [symbol] (NNNRRT) | Species: | | | |

sgRNA: 5′-G AATGCTGGCATAGAGCAGCA-3′ (SEQ ID NO: 449) (Fw)

| | | | | |
|---|---|---|---|---|
| Site 1 Editor: | C to T | Base: ⁷C | Position: 5 | Notes: |

| | |
|---|---|
| 36. PAM: TGA (NGA) | Species: spCas^{mut} |

sgRNA: 5′-G TGGCATAGAGCAGCACTAAA-3 (SEQ ID NO: 450)(Fw)

| | | | | |
|---|---|---|---|---|
| Site 1 Editor: | A to G | Base: ¹²A | Position: 5 | Notes: |

### Example 3: Use of ABE8 Editor to Edit C:G-T:a in Exon 7 Spinal Muscular Atrophy (SMA)

[0560] This Example tested a series of ABE8-base editors to repair C:G->T:A in position 6 of exon 7 that is causal to spinal muscular atrophy (SMA). Eleven different editors were tested, including ABE8 fusions to SpCas9, SaKKH, Cas9-NG, CP1028, CP1041, CP1041-NG, VRQR, Cpf1, SpyMac, and the evolved NRRH and NRCH editors developed by our lab in combination with a series of sgRNAs that placed the target nucleotide at positions ranging 5 through 12 in exon 7.

[0561] Fusion Constructs Tested:

| BASE EDITOR FUSION | AMINC ACID SEQUENCE |
|---|---|
| ABE8-NRTH editor | (SEQ ID NO: 463) |
| ABE8-SpyMac editor | (SEQ ID NO: 464) |
| ABE8-VRQR-CP1041 editor | (SEQ ID NO: 465) |
| ABE8-SaCas9 editor | (SEQ ID NO: 466) |
| ABE8-NRCH editor | (SEQ ID NO: 467) |
| ABE8-NRRH editor | (SEQ ID NO: 468) |
| ABE8-SaKKH editor | (SEQ ID NO: 469) |
| ABE8-Cas9-NG editor | (SEQ ID NO: 470) |
| ABE8-CP1041 editor | (SEQ ID NO: 471) |
| ABE8-CP1028 editor | (SEQ ID NO: 472) |
| ABE8-CPF1 editor | (SEQ ID NO: 473) |
| ABE8-VRQR editor | (SEQ ID NO: 474) |
| ABE8-Cas9-NG-CP1041 editor | (SEQ ID NO: 475) |
| ABE8-iSpyMac editor | (SEQ ID NO: 476) |

[0562] sgRNAs Tested for Each Construct:

| sgRNA | | SNV | |
|---|---|---|---|
| name | PAM | Position | sequence |
| 3 | NGA | 9 | TTTTGTCTAAAACCctgtaa |
| | | | SEQ ID NO: 368) |
| 37 | NGG | 10 | ATTTTGTCTAAAACCctgta |
| | | | SEQ ID NO: 364) |
| 139 | NNNRRT | 8 | TTTGTCTAAAACCctgtaag |
| | | | (SEQ ID NO: 366) |
| 52 | NAA | 8 | TTTGTCTAAAACCctgtaag |
| | | | (SEQ ID NO: 366) |
| 177 | NAT | 5 | GTCTAAAACCCTGTAAGGAA |
| | | | (SEQ ID NO: 408) |
| 178 | NAA | 6 | TGTCTAAAACCCTGTAAGGA |
| | | | (SEQ ID NO: 409) |
| 179 | NAA | 7 | TTGTCTAAAACCCTGTAAGG |
| | | | (SEQ ID NO: 410) |
| 54 | TTTV | 10 | ATTTTGTCTAAAACCCTGTA |
| | | | AGG (SEQ ID NO: 411) |
| 55 | TTTV | 11 | GATTTTGTCTAAAACCCTGT |
| | | | AAG(SEQ ID NO: 412) |
| 56 | TTTV | 12 | TGATTTTGTCTAAAACCCT |
| | | | GTAA(SEQ ID NO: 413) |

[0563] FIG. 4 shows the results of adenine base editing of the SMN2 disease causing C840T in SMA mESCs. Editors are denoted below the x-axis with PAM sequence in parentheses, and protospacer position of the target nucleotide assuming a 20 nt protospacer where the PAM is at position 21-23. The results show that the iSpyMac and the CP constructs edited C840T with high efficiency.

[0564] Proof of repair of the exon 7 splicing error is shown in FIG. 5, which shows a gel electrophoresis image of SMN cDNA PCR amplification spanning exon 6 to exon 8, depicting bands that include or that have skipped exon 7 in pre-mRNA splicing in SMA mESCs treated with the indicated ABE8-fusion base editors.

### Example 4: Genome Editing Therapeutics Development for Spinal Muscular Atrophy

[0565] SMA is a progressive motor neuron disease (MND) that is the leading genetic cause of infant death across all ethnic groups¹⁻³. SMA is caused by homozygous loss of the survival motor neuron 1 (SMN1) gene with retention of one or more copies of the highly similar SMN2, that harbors a C-to-T transition at position 6 of exon 7 (C6T) which causes exon skipping (FIG. 5A)^{4,5}. The resulting truncated SMNΔ7 protein partially compensates for the loss of cell essential SMN, but is rapidly degraded in cells resulting in SMN insufficiency that leads to paralysis and fatality of patients⁶⁻⁹.

[0566] Correcting SMN in patient tissues can rescue motor function and substantially improve the prognosis of SMA patients¹⁰⁻¹⁴. The therapeutic antisense oligonucleotide (ASO) nusinersen (Spinraza) and the small molecule splicing modifier risdiplam (Evrysdi) stimulate splicing inclusion of exon 7 in SMN2 transcripts, however, their effect is transient and thus continued treatment is required throughout patients' lifetimes to maintain a therapeutic benefit¹⁵⁻¹⁸. AAV-mediated gene complementation with Zolgensma provides constitutive high-level SMN1 cDNA expression in targeted cells¹⁹⁻²¹, yet it is currently unknown whether episomal AAV will permanently persist in motor neurons to provide a life-long therapeutic benefit to patients. Moreover, endogenous SMN expression is tightly regulated and restricted to relatively low levels across all tissues²²⁻²⁵, and high-level SMN expression may induce tissue-specific pathologies over time²⁶⁻²⁹. A therapeutic modality that provides permanent correction of SMN expression subject to native gene regulation could address limitations of the currently approved therapies.

[0567] Presented herein are adenine base editing and Cas9-nuclease genome editing strategies to stably correct SMN mRNA and protein phenotypes of SMA. It has been demonstrated that high-throughput characterization of editing outcomes coupled with machine learning can enable accurate in silico prediction of base editing and Cas9-nuclease genome editing outcomes at a target locus of interest³⁰⁻³⁹, which can facilitate the design of precision genome editing therapeutics. The sequence determinants of base editing were characterized by the recently reported adenine base editor 8e (ABE8e) and BE-Hive and inDelphi predictive models of genome editing outcomes were used to identify strategies that improve expression of SMN. An ABE8e editing strategy was identified that uses the engineered Cas9 protein SpyMac⁴⁰ to enable correction of the pathogenic A•T base pair in SMN2 with 99% efficiency and >80% single nucleotide editing precision in mutant Δ7 SMA (SMN2+/+; SMNΔ7+/+; Smn−/−) mouse embryonic stem cells, and the subsequent upregulation of SMN2 exon 7 splicing inclusion and SMN protein expression was observed. 90% C6T editing in vivo in targeted cells of the central nervous system (CNS) following AAV9-mediated delivery by intracerebroventricular injection in SMA mice⁴¹ was achieved, resulting in a significant increase in survival and improvement of motor function.

[0568] A dual-therapy strategy combining ABE8e-SpyMac treatment with nusinersen was explored to transiently ameliorate disease phenotypes of SMA Δ7 mice and extend the narrow temporal window for phenotypic rescue. It was demonstrated that nusinersen did not perturb base editing efficiency, and that co-delivery of a single low dose of nusinersen on P0 heightened survival of AAV9-ABE8e-SpyMac treated animals up to 317 days (the longest living animal is alive at the time of this filing). These findings establish the therapeutic potential of adenine base editing for stable genetic modification of the SMN2 gene as a novel treatment modality for SMA.

### Precise SMN2 Nuclease Editing Increases SMN Protein Levels

[0569] SMN levels are subject to genetic, transcriptomic, and post-translational regulation. Cas-nuclease disruption of key regulatory sequences was explored to determine whether it could enhance SMN levels in Δ7 SMA mutant mouse embryonic stem cells that are knockout for endogenous Smn1 and homozygous for human SMN2 and SMNΔ7-cDNA transgenes (SMA mESCs)⁴⁵. Splicing of SMN2 exon 7 was strongly influenced by the downstream intronic splicing silencer ISS-N1 that harbors two heterogeneous nuclear ribonucleoprotein (hnRNPs) A1/A2 binding sites (FIG. 5A)⁴⁶. Sequence deletions in the ISS-N1 region, in particular within and downstream of the 3′-hnRNP A1/A2 domain, significantly restored inclusion of exon 7 in SMN2 mRNA transcripts similar to blocking of ISS-N1 by the nusinersen ASO^{46,47}.

[0570] As a means to correct SMN2 exon 7 missplicing, wildtype or variant SpCas9 nuclease strategies were investigated at the ISS-N1 region (FIG. 5B). sgRNAs that enabled ‘good’ outcomes, defined as the deletion of four or more nucleotides in ISS-N1 including at least 1 nt of the 3′-hnRNP A1/A2 domain, were predicted by inDelphi models of editing outcomes based on wildtype SpCas9-cutting data (FIG. 5C)³⁰. The compatibility of Cas nucleases was assessed based on their reported activity at the respective sgRNA PAM sequences^{40,48-51}, focusing on strategies expected to result in ≥30% good editing.

[0571] SMA mESCs were co-transfected with a nuclease plasmid carrying a Blasticidin-resistance cassette and an sgRNA expression plasmid carrying a Hygromycin-resistance cassette, both of which were flanked by Tol2 transposase sequences, alongside a Tol2 transposon plasmid to allow for stable antibiotic selection and stable integration of all genome editing components. Genome editing efficiency at the ISS-N1 locus was limited and no significant increase of exon 7 inclusion was observed in SMN2 mRNA (FIG. 5D, FIGS. 8A-8B), suggesting that at present commonly used Cas-nucleases are not well suited to improve SMN2 splicing by modification of ISS-N1.

[0572] The critical distinction between functional full-length SMN (FL-SMN) and SMNΔ7 is the substitution of the C-terminal 16 amino acids encoded by exon 7 with four amino acids (EMLA (SEQ ID NO: 466)) encoded by the 3′-UTR in exon 8 that causes protein instability (FIG. 5B)⁶. The EMLA (SEQ ID NO: 466) peptide chain stimulates degradation of SMN; however, appendage of five or more heterologous peptides to the C-terminus of SMN exons 1-6 or SMNΔ7 has previously been shown to restore protein stability and quantitatively increase cellular SMN levels⁵². DNA modification of the 5′ of exon 8 to induce a frame-shift or to ablate the early stop-codon was investigated to determine whether it could yield C-terminally modified SMNΔ7 (SMNΔ7mod) protein products that were not subject to the rapid degradation suffered by SMNΔ7. Nuclease editing strategies were evaluated using SpCas9-variants targeting the first 5 codons of exon 8 using inDelphi³⁰, defining ‘good’ editing outcomes as those that did not disrupt the exon 8 acceptor splice site and resulted in the addition of 5 or more alternative amino acids to the C-terminus of SMNΔ7. Two strategies compatible with SpCas9 and Cas9-NG that induced good genotypes in over 50% of outcomes were identified. Efficient editing was observed following transfection in SMA mESCs, resulting in a 2-fold upregulation in SMNΔ7mod protein levels relative to mock-edited cells (FIGS. 5E-5F). Thus, Cas-nuclease editing of SMN2 guided by predictive modeling of editing outcomes improved a cellular hallmark of SMA pathology. Systematic characterization of ABE8e base editing activity

[0573] Double-stranded DNA breaks, such as those created by Cas9-nuclease, may result in large deletions and complex rearrangements^{53,54}, especially when more than one genomic locus is targeted simultaneously⁵⁵. Copy number of SMN2 varies from 0 to 8, and SMA patients generally have 2 or more copies⁵⁶; thus, Cas9-targeting of SMN2 may result in unintended restructuring of chromosome 5q13 that harbors the SMN genes, in particular as multiple identical gene copies are present in cis. Base editing rarely induces DSBs³¹, and may thus present a safer alternative to nuclease editing as a potential genome editing therapeutic.

[0574] Adenine base editing of the C-to-T transition in exon 7 (C6T) was investigated as a means to correct SMN2 missplicing (FIG. 6A). It was found that the sequence flanking C6T was deplete of canonical SpCas9 ‘NGG’ PAMs to position the target nucleotide within a typical base editor window^{31,32}. Base editing outcome predictions by BE-Hive machine learning models for canonical ABE7.10 utilizing SpCas9 suggested that the A•T target in SMN2 was largely intractable to base editing (FIGS. 8C-8E)³¹, and the ABE7.10 deaminase enzyme often performed poorly with Cas9-protein alternatives^{58,59}.

[0575] A newly evolved ABE8e that demonstrates increased deaminase activity relative to ABE7.10 and has greater compatibility with a wide range of Cas-protein variants was recently reported^{59,60}. Since local sequence features, Cas-proteins, and base editor positioning all affect deamination efficiency and single-nucleotide precision of base editors³¹, the sequence features that govern ABE8e editing outcomes to aid the selection of an optimal ABE8e editing strategy for SMN2 C6T correction were investigated.

[0576] Sequence determinants of ABE8e (bpNLS-TadA*-SpCas9 D10A-bpNLS) editing outcomes were characterized using the previously reported stably integrated library of 10,638 matched sgRNA and target pairs in mouse embryonic stem cells (mESCs) named the “comprehensive context library”³¹. This library included 8,142 base editor target sequences with all possible 6-mers surrounding a substrate A or C nucleotide at protospacer position 6, and 2,496 sgRNA-target pairs that collectively contained all possible 5-mers across positions −1 to 13 (FIG. 6B). A high correlation of ABE8e base editing outcomes was observed across two biological replicates of the comprehensive context library in mESCs, and an increase in average base editing activity (frequency of target-modified outcomes among total sequenced reads) relative to ABE7.10 and ABE7.10-CP1041 was observed across all sites (66% ABE8e, compared to 18% and 12% for ABE7.10 and ABE7.10-CP1041 respectively³¹). The resulting data was used to train BE-Hive machine learning models to predict bystander editing patterns and base editing efficiency of ABE8e³¹.

The phage-assisted evolution of ABE7.10 towards ABE8e significantly altered base editing sequence-activity characteristics^{31,32,59}. A positional preference for ABE8e editing activity centered on position 6 with an editing window spanning protospacer positions 3-10 was observed (window defined as ≥30% of maximum editing, FIG. 6C). Similar to previous-generation ABEs, ABE8e maintained a dislike for bystander adenines surrounding a target A (FIG. 6D)^{31,32,59}, though this effect was outweighed by an overall substantial increase in enzymatic activity⁶⁰. These characterizations refine and expand upon previous characterizations of ABE8e base editing activity⁵⁹.

### Adenine Base Editing Correction of the SMN2 Pathogenic A•T Base Pair

[0577] For a canonical ABE8e editing approach using SpCas9, the nearest downstream ‘NGG’ PAM placed the target A•T pair of SMN2 at position 10, which falls at the edge of the ABE8e base editing window. Use of alternative Cas-proteins with alternative PAM preferences could allow for better placement of the target nucleotide. BE-Hive was used to predict correction efficiency and precision of the SMN2 A•T target pair with other sgRNAs that were compatible with alternative Cas-proteins, by assuming similar base editing characteristics for ABEs using engineered and evolved SpCas9-variants^{40,48,49,61}, and accounting for a window shift of ABEs using SaCas9 (+1 nt) and LbCas12a (+4 nt) as previously described³¹.

[0578] SMA mESCs were transfected with ABE7.10 and ABE8e base editor variants, and editing outcomes consistent with BE-Hive prediction were observed, demonstrating that computationally learned characteristics of ABEs using SpCas9 can be extended to ABE Cas-variants. Notably, base editing efficiency varied dependent on Cas-protein as previously observed^{58,59}. The highest efficiency A•-to-G•C conversion overall was achieved using SpyMac and iSpyMac-variant ABE8e paired with sgRNA52 (98.9±0.71% SpyMac and 98.8±0.42% iSpyMac) or sgRNA179 (94±3.35% SpyMac and 98±0.59% iSpyMac), and with ABE8e-CP1028 paired with sgRNA37 (99.5±0.06%), that each placed the pathogenic SNP at positions 5, 8, and 10 respectively. Analysis of the resulting base edited genotypes revealed that ABE8e-SpyMac paired with sgRNA52 induced the highest purity single nucleotide A•T-to-G•C edits devoid of bystander editing outcomes or indels that resulted from base editing (84.2±2.4%).

### Off-Target Analysis of an ABE8e Strategy to Correct SMN2 in the Human Genome

[0579] To assess the genome specificity of the optimized ABE8e-SpyMac strategy, off-target editing was characterized by the CIRCLE-seq method⁶². Purified ribonucleoprotein (RNP) complexes comprised of SpyMac nuclease and sgRNA52 were generated, and a short list of SpyMac-dependent DNA off-target loci were identified in vitro using human genomic DNA extracted from HEK293T cells (FIG. 8F). Top targets included the SMN2 on-target locus and the equivalent locus in the SMN1 gene that had the single A•T-to-G•C mismatch at sgRNA position 8, which is present in wild type human genomes but absent in those of SMA patients.

[0580] Off-target base editing activity was assessed at the top 25 CIRCLE-seq hits, which had ≥8% editing efficiency relative to the on-target site, alongside SMN2 and SMN1 loci by transfection of ABE8e-SpyMac+sgRNA52 in wild type HEK293T cells followed by targeted amplicon sequencing. 48.5±1.8% C6T editing at on-target SMN2 loci was achieved, and minimal ABE8e-SpyMac editing at SMN1 loci (0.15±0.07%) and at off-target site rank 19 (0.4±0.14%) which falls in an intergenic region of chromosome 15 was observed (FIG. 6F). No base editing was detected (>0.03% relative to untreated control) at the remaining off-target loci.

[0581] Off-target analysis of SpyMac nuclease+sgRNA52 in HEK293T cells yielded highly similar results. Indels were observed at 41.9±3.0% of SMN2 alleles and 2.1±0.33% of SMN1 alleles, and no indels were detected at the remaining off-target loci (FIG. 8G). Together, these data indicated that the SpyMac Cas-component, and the ABE8e-SpyMac base editor overall paired with sgRNA52 were highly specific to the SMN2 on-target locus. The optimized ABE8e-SpyMac+sgRNA52 strategy is referred to as ‘ABE’ editing, hereafter.

### ABE-Mediated Rescue of SMA Pathology in Mice

[0582] The C6T substitution in SMN2 exon 7 affected a multitude of splicing regulatory interactions that resulted in majority SMNΔ7 processed mRNA transcripts at the expense of full length-SMN (FL-SMN), leading to the production of unstable SMNΔ7 protein products⁶³. A substantial increase in FL-SMN mRNA transcripts and SMN protein levels was observed following ABE editing of SMA mESCs by the ABE editing strategy presented herein (FIGS. 6G-6H). Reverse-transcription was performed and followed by PCR (RT-PCR) of SMN2 transcripts, and SMNΔ7 and FL-SMN products were quantified by automated electrophoresis. A >5.6-fold increase in the subset of FL-SMN products among all SMN transcripts in ABE treated cells (87.1±1.5%) was observed relative to mock-treated cells (15.5±1.6%) that was comparable to the SMN1 exon 7 inclusion ratio observed in wild type cells^{46,47}, equivalent to peak exon 7 inclusion following SMA mESC transfection with 20 nM nusinersen (56.4±1.3%, FIG. 8H). SMN protein expression was quantified by Western Blot and normalized to endogenous Histone H3 levels, and a >8.2-fold increase was detected in SMN protein in ABE treated SMA mESCs (36.3±8.9%) relative to mock-treated cells (4.4±1.2%, two-tailed t-test p=0.02). Thus, correction of SMN2 C6T by ABE editing rescues cellular hallmarks of SMA pathology.

[0583] Next, an adeno associated virus (AAV) strategy for in vivo delivery of the ABE8e-SpyMac base editor and sgRNA52 was developed. Together, base editor and sgRNA expression cassettes exceeded the packaging capacity of a single AAV vector; however, it has been previously demonstrated that co-delivery of split-base editors packaged as single-stranded (ss) viral genomes into AAV-particles can overcome this size limitation⁶⁴⁻⁶⁷. Fusion of trans-splicing inteins to split-base editors severed within their Cas9 component enabled efficient self-assembly of full-length base editors when each half was co-expressed in cells. A split-intein ABE8e-SpyMac dual-AAV strategy driven by a Cbh-promoter was designed, using each split DnaE intein half from Nostoc punctiforme (Npu) to divide ABE8e-SpyMac within the SpCas9 domain immediately before Cys 574 (FIG. 6I)⁴⁰68, a design previously demonstrated to enable efficient editing by ABEmax^{66,67}.

[0584] A first sgRNA52 expression cassette was included on the ssAAV genome encoding the C-terminal portion of split-ABE8e-SpyMac, as before with v5 AAV-ABEmax⁶⁶. ABE8e functions with a single N-terminal TadA* monomer and is therefore smaller (4.8 kb) than ABE7.10 (5.4 kb) which uses an N-terminally encoded wtTadA-TadA* heterodimer^{32,59}. This 600 bp reduction at the N-terminal split-ABE8e-SpyMac component afforded the space to include an additional sgRNA52 expression cassette into this ssAAV genome. Co-transfection of split-intein ABE8e-SpyMac plasmids in SMA mESCs induced A•T-to-G•C conversion of SMN2 C6T with similar efficiency to full-length ABE8e-SpyMac (FIG. 6J). The ssAAV-encoded split-intein ABE8e-SpyMac with dual-sgRNA52 is referred to as ‘ssAAV-ABE’ hereafter.

[0585] 1.3E13 vg/kg of each half of ssAAV-ABE was co-delivered on postnatal day (P) 0 and P1 along with 2.7E12 vg/kg AAV9-Cbh-eGFP-KASH (Klarsicht/ANC-1/Syne-1 homology domain, hereafter AAV9-nucGFP)⁶⁶ as a transduction control, by intracerebroventricular (ICV) injection into homozygous mutant Δ7 SMA neonates. Nuclei from the central nervous system (CNS) of deceased treated animals was isolated and 87.0±3.5% conversion of the A•T target pair in SMN2 exon 7 in GFP-positive nuclei was observed (FIG. 7F), indicating that the optimized ABE strategy edited at high efficiency in transduced tissues in vivo, similar to SMA mESCs in culture.

[0586] A marked improvement in the bodyweight of ssAAV-ABE treated SMA mutant animals, and a significant increase in survival relative to untreated controls from median 17 to 24 days was observed (Mantel-Cox test p=0.008, FIG. 7A). The bodyweight and survival of SMA animals was comparable to that following late neonatal (>P6) ICV treatment with self-complementary (sc) AAV9-SMN1, and injection of low doses (˜1E13 vg/kg) scAAV9-SMN1 in previous reports^{19,69}.

[0587] Treatment with ssAAV-ABE partially rescued SMA motor phenotypes. At P7 the ability of all mutant animals to right themselves was similar, however, by P14 the righting reflex of ssAAV-ABE treated animals improved relative to untreated controls. At P25 ssAAV-ABE treated SMA mutant animals showed difficulty in the inverted screen test relative to control animals. Notably, age-matched untreated animals were not available as controls for this assay due to their short lifespan. Collectively these data show that postnatal ssAAV-ABE treatment can correct the SMN2 C6T with high efficiency in vivo, leading to partial rescue of motor function and lethality in Δ7 SMA mice.

### Combining ABE and Nusinersen Treatment Enhances Rescue of SMA Mice

[0588] Upregulation of SMN can greatly rescue motor function and improve survival of SMA patients and animal models, so long as sufficient levels of SMN are achieved prior to onset of neuromuscular pathology^{19,69,70}. Even high levels of SMN protein cannot correct neuromuscular junction (NMJ) pathology and fatality once SMA has progressed to an advanced stage. The clinically approved scAAV9 therapy for SMA confers only partial rescue in Δ7 SMA mice when administered at low doses or after P6, and earlier postnatal SMN rescue is correlated with improved survival.

[0589] For ssAAVs, second-strand synthesis is a rate-limiting step in the expression of virally-transduced expression cassettes⁷¹⁻⁷⁴. Sufficient accumulation SMN protein following ssAAV9-ABE8e co-transduction requires a series of processes to be completed first, including (1) second-strand synthesis of the split ssAAV-ABE genomes, (2) transcription and translation of the split-intein ABE8e-SpyMac protein segments, (3) self-assembly of full-length ABE8e-SpyMac and sgRNA52 RNP, (4) targeted base editing and DNA repair, (5) transcription of corrected human SMN2 genes from the low-expression endogenous promoter, (6) mRNA processing, and (7) translation of corrected SMN2 transcripts. The ability of endogenous transcriptional and post-transcriptional regulatory mechanisms to restrict the expression of rescued SMN alleles to the typically low levels of wild type tissues is a key desirable feature of a potential base editing therapeutic, which may be of particular importance for long-term rescue of SMA patients. However, the steps (1-7) described above can dampen the phenotypic rescue that follows from postnatal ssAAV-ABE treatment of Δ7 mice in spite of efficient in vivo base editing correction. It was hypothesized that the timeframe for sufficient SMN protein to accumulate in cells after ssAAV-ABE co-transduction exceeds the temporal window for complete rescue of Δ7 mice, but that transient amelioration of SMA in spinal motor neurons by other means could allow more opportunity for ssAAV9-ABE8e mediated rescue to take hold.

[0590] Single dose ICV injection of nusinersen on P0 resulted in transient rescue of molecular and physiological motor neuron degeneration phenotypes in Δ7 mice and an improvement in survival of several weeks⁷⁵. The mechanism of ABE-mediated editing of SMN2 exon 7 DNA is entirely orthogonal to nusinersen binding of SMN2 intron 7 pre-mRNA, and no change was observed in base editing outcomes following co-transfection of 20 nM nusinersen with ABE8e-SpyMac and sgRNA52 in SMA mESCs (FIG. 7C). Thus, a single dose of nusinersen may be used to transiently extend the temporal window for rescue of Δ7 mice to provide a greater opportunity for stable genotypic correction of SMA by ssAAV9-ABE.

[0591] Mutant Δ7 mice were ICV injected with 1 ug nusinersen on P0 and either 1.3E13 vg/kg of each ssAAV9-ABE with 2.7E12 vg/kg AAV9-nucGFP as before, or with 2.7E13 vg/kg AAV9-nucGFP alone on P0 and P1. Co-injection of nusinersen and AAV9-nucGFP improved survival relative to untreated controls (median 29 days, Mantel-Cox test p=0.0001), but the increase was not significant compared to ssAAV9-ABE treatment without nusinersen (FIG. 7D). Promisingly, combined ssAAV9-ABE treatment with nusinersen further improved survival of SMA mice relative to individual nusinersen or ssAAV9-ABE treatment conditions (median 77 days, Mantel-Cox test p=0.002) with a maximum survival of over 317 days (animal is alive at the time of this filing). Notably, no significant difference in bodyweight was observed between any of the treatment cohorts (FIG. 7E). Rather, body weight for all cohorts was improved relative to untreated mutants, yet lower than wild type controls as previously observed following nusinersen or scAAV9-SMN1 treatment of Δ7 mice^{19,69,76}.

[0592] Animals treated with ssAAV-ABE had improved motor skills relative to animals treated only with nusinersen. Both cohorts showed a similar improvement in their ability to right themselves at P7 and P14, suggesting that ssAAV-ABE mediated genome editing provides little additional benefit in the presence of nusinersen. However, as the transient effect of nusinersen dissipated, a significant improvement in motor function was observed. ssAAV-ABE and nusinersen treated animals had a longer latency in the inverted screen test at P25 than nusinersen control animals, at which point a significant fraction of the control cohort was deceased. At P40, voluntary movement of ssAAV-ABE and nusinersen treated animals was measured by open-field testing and though they were active, their mobility was reduced relative to wild type animals. Notably, all age-matched nusinersen control animals were deceased and therefore not available as controls for this assay. Collectively these data show that postnatal ssAAV-ABE treatment can correct the SMN2 C6T with high efficiency in vivo, leading to partial rescue of motor function and fatality of Δ7 SMA mice.

### Discussion

[0593] Genome editing strategies were investigated as a novel therapeutic paradigm for the treatment of SMA by permanent modification of the SMN2 gene. Adenine base editing and Cas9-nuclease genome editing strategies that modify well-characterized transcriptional and post-transcriptional regulatory sequences of SMN2 were thoroughly investigated. It was demonstrated that the BE-Hive and inDelphi predictive models trained on SpCas9 base editors and nucleases facilitated the design of precision base editing strategies, and non-conventional nuclease editing strategies using SpCas9 and Cas-variant editors that restore expression of SMN. A novel base editor variant was developed that utilizes the ABE8e deaminase and SpyMac Cas-component that enables highly efficient and precise single nucleotide correction of the pathogenic SMN2 C6T target with minimal off-target specificity in the genome.

[0594] To investigate the therapeutic potential of an SMN2 base editing treatment, ssAAV9-ABE was delivered by ICV injection to Δ7 SMA mice and up to 90% C6T correction in transduced cells in vivo was achieved. It was shown that the FDA-approved ASO drug nusinersen did not interfere with base editing efficiency in cells, and a combination therapy approach was developed that improved survival of ssAAV9-ABE treated SMA mice by co-delivery of nusinersen to extend the temporal window in which ABE-mediated rescue could occur. Notably, the temporal window for treatment of SMA patients was far greater than in Δ7 SMA mice; thus an ssAAV9-ABE therapy developed for clinical use may not require transient rescue of motor neurons for base editing rescue to take hold.

[0595] While SMN2 and SMN1 expression are similar in SMA patients, the SMN2 transgene in SMA mice produces significantly fewer transcripts than the endogenous murine Smn1 owing to an unfavorable integration locus. While it was expected that SMN expression would be significantly delayed and reduced following modification of the genomic SMN2 gene relative to scAAV9-SMN1 transduction, significant rescue of survival in SMA mice that mimics 1E13 vg/kg ICV delivery of scAAV9-SMN1¹⁹ was observed. The requisite co-delivery of the dual ssAAV9-ABE vectors lowered the deliverable therapeutic dose by half, yet 90% C6T editing correction in GFP-sorted nuclei was observed, indicating that even efficient triple-transduction (ssAAV9-ABE+AAV9-nucGFP) and genome editing do take place in the CNS of treated animals. Collectively, these data show the therapeutic potential of a base editing approach to permanently correct the endogenous SMN2 C6T for the treatment of SMA.

### References for Example 4

[0596] 1. Lefebvre, S. et al. Identification and characterization of a spinal muscular atrophy-determining gene. Cell 80, 155-65 (1995).
[0597] 2. Pearn, J. Classification of spinal muscular atrophies. Lancet 1, 919-922 (1980).
[0598] 3. Sugarman, E. A. et al. Pan-ethnic carrier screening and prenatal diagnosis for spinal muscular atrophy: clinical laboratory analysis of >72 400 specimens. Eur. J. Hum. Genet. 20, 27-32 (2012).
[0599] 4. Lorson, C. L., Hahnen, E., Androphy, E. J. & Wirth, B. A single nucleotide in the SMN gene regulates splicing and is responsible for spinal muscular atrophy. Proc. Natl. Acad. Sci. 96, 6307-6311 (1999).
[0600] 5. Monani, U. R. et al. A single nucleotide difference that alters splicing patterns distinguishes the SMA gene SMN1 from the copy gene SMN2. Hum. Mol. Genet. 8, 1177-1183 (1999).
[0601] 6. Cho, S. & Dreyfuss, G. A degron created by SMN2 exon 7 skipping is a principal contributor to spinal muscular atrophy severity. Genes Dev. 24, 438-42 (2010).
[0602] 7. Lorson, C. L. & Androphy, E. J. An exonic enhancer is required for inclusion of an essential exon in the SMA-determining gene SMN. Hum. Mol. Genet. 9, 259-266 (2000).
[0603] 8. Vitte, J. et al. Refined characterization of the expression and stability of the SMN gene products. Am. J. Pathol. 171, 1269-1280 (2007).
[0604] 9. Burnett, B. G. et al. Regulation of SMN Protein Stability. Mol. Cell. Biol. 29, 1107-1115 (2009).
[0605] 10. Mendell, J. R. et al. Single-dose gene-replacement therapy for spinal muscular atrophy. N. Engl. J. Med. 377, 1713-1722 (2017).
[0606] 11. Ottesen, E. W. ISS-N1 makes the first FDA-approved drug for spinal muscular atrophy. Translational Neuroscience 8, 1-6 (2017).
[0607] 12. Hoy, S. M. Onasemnogene Abeparvovec: First Global Approval. 79, 1255-1262 (2019).
[0608] 13. Sumner, C. J. & Crawford, T. O. Two breakthrough gene-targeted treatments for spinal muscular atrophy: challenges remain. J Clin Invest 128, 3219 (2018).
[0609] 14. Parente, V. & Corti, S. Advances in spinal muscular atrophy therapeutics. Therapeutic Advances in Neurological Disorders 11, (2018).
[0610] 15. Singh, N. N., Howell, M. D., Androphy, E. J. & Singh, R. N. How the discovery of ISS-N1 led to the first medical therapy for spinal muscular atrophy. Gene Therapy 24, 520-526 (2017).
[0611] 16. Ratni, H. et al. Discovery of Risdiplam, a Selective Survival of Motor Neuron-2 (SMN2) Gene Splicing Modifier for the Treatment of Spinal Muscular Atrophy (SMA). J. Med. Chem. 61, 6501-6517 (2018).
[0612] 17. Poirier, A. et al. Risdiplam distributes and increases SMN protein in both the central nervous system and peripheral organs. Pharmacol. Res. Perspect. 6, (2018).
[0613] 18. Wurster, C. D. & Ludolph, A. C. Nusinersen for spinal muscular atrophy. Therapeutic Advances in Neurological Disorders 11, (2018).
[0614] 19. Meyer, K. et al. Improving single injection CSF delivery of AAV9-mediated gene therapy for SMA: A dose-response study in mice and nonhuman primates. Mol. Ther. 23, 477-487 (2015).
[0615] 20. Armbruster, N. et al. Efficacy and biodistribution analysis of intracerebroventricular administration of an optimized scAAV9-SMN1 vector in a mouse model of spinal muscular atrophy. Mol. Ther.—Methods Clin. Dev. 3, 16060 (2016).
[0616] 21. Bevan, A. K. et al. Systemic gene delivery in large species for targeting spinal cord, brain, and peripheral tissues for pediatric disorders. Mol. Ther. 19, 1971-1980 (2011).
[0617] 22. Kernochan, L. E. et al. The role of histone acetylation in SMN gene expression. doi:10.1093/hmg/ddi130
[0618] 23. d'Ydewalle, C. et al. The Antisense Transcript SMN-AS1 Regulates SMN Expression and Is a Novel Therapeutic Target for Spinal Muscular Atrophy. Neuron 93, 66-79 (2017).
[0619] 24. Woo, C. J. et al. Gene activation of SMN by selective disruption of lncRNA-mediated recruitment of PRC2 for the treatment of spinal muscular atrophy. Proc. Natl. Acad. Sci. U.S.A. 114, E1509-E1518 (2017).
[0620] 25. Ramos, D. M. et al. Age-dependent SMN expression in disease-relevant tissue and implications for SMA treatment. J. Clin. Invest. 129, 4817-4831 (2019).
[0621] 26. Cucchiarini, M., Madry, H. & Terwilliger, E. F. Enhanced expression of the central survival of motor neuron (SMN) protein during the pathogenesis of osteoarthritis. J. Cell. Mol. Med. 18, 115-124 (2014).
[0622] 27. Gama-Carvalho, M. et al. Linking amyotrophic lateral sclerosis and spinal muscular atrophy through RNA-transcriptome homeostasis: a genomics perspective. J. Neurochem. 141, 12-30 (2017).
[0623] 28. Blauw, H. M. et al. SMN1 gene duplications are associated with sporadic ALS. Neurology 78, 776-780 (2012).
[0624] 29. Corcia, P. et al. The importance of the SMN genes in the genetics of sporadic ALS. Amyotroph. Lateral Scler. 10, 436-40 (2009).
[0625] 30. Shen, M. et al. Predictable and precise template-free CRISPR editing of pathogenic variants. Nature 563, 646-651 (2018).
[0626] 31. Arbab, M. et al. Determinants of Base Editing Outcomes from Target Library Analysis and Machine Learning. Cell 182, 463-480.e30 (2020).
[0627] 32. Gaudelli, N. M. et al. Programmable base editing of A•T to G•C in genomic DNA without DNA cleavage. Nature 551, 464-471 (2017).
[0628] 33. Komor, A. C., Kim, Y. B., Packer, M. S., Zuris, J. A. & Liu, D. R. Programmable editing of a target base in genomic DNA without double-stranded DNA cleavage. Nature 533, 420-424 (2016).
[0629] 34. Nishida, K. et al. Targeted nucleotide editing using hybrid prokaryotic and vertebrate adaptive immune systems. Science (80-.). 353, aaf8729 (2016).
[0630] 35. Thuronyi, B. W. et al. Continuous evolution of base editors with expanded target compatibility and improved activity. Nat. Biotechnol. (2019). doi:10.1038/s41587-019-0193-0
[0631] 36. Gehrke, J. M. et al. An APOBeC3A-Cas9 base editor with minimized bystander and off-target activities. Nat. Biotechnol. 36, 977 (2018).
[0632] 37. Cong, L. et al. Multiplex genome engineering using CRISPR/Cas systems. Science (80-.). 339, 819-823 (2013).
[0633] 38. Mali, P. et al. RNA-guided human genome engineering via Cas9. Science (80-.). 339, 823-826 (2013).
[0634] 39. Jinek, M. et al. A programmable dual-RNA-guided DNA endonuclease in adaptive bacterial immunity. Science (80-.). 337, 816-21 (2012).
[0635] 40. Chatterjee, P. et al. A Cas9 with PAM recognition for adenine dinucleotides. Nat. Commun. 11, 1-6 (2020).
[0636] 41. Le, T. T. et al. SMNΔ7, the major product of the centromeric survival motor neuron (SMN2) gene, extends survival in mice with spinal muscular atrophy and associates with full-length SMN. Hum. Mol. Genet. 14, 845-857 (2005).
[0637] 42. Harada, Y. et al. Combination molecular therapies for type 1 spinal muscular atrophy. Muscle and Nerve 62, 550-554 (2020).
[0638] 43. Lee, B. H. et al. Combination therapy with nusinersen and AVXS-101 in SMA type 1. (2019). doi:10.1212/WNL.0000000000008207
[0639] 44. CURE SMA. Scientific considerations for drug combinations. (2019).
[0640] 45. Rodriguez-Muela, N. et al. Single-Cell Analysis of SMN Reveals Its Broader Role in Neuromuscular Disease. Cell Rep. 18, 1484-1498 (2017).
[0641] 46. Singh, N. K., Singh, N. N., Androphy, E. J. & Singh, R. N. Splicing of a critical exon of human Survival Motor Neuron is regulated by a unique silencer element located in the last intron. Mol. Cell. Biol. 26, 1333-46 (2006).
[0642] 47. Hua, Y., Vickers, T. A., Okunola, H. L., Bennett, C. F. & Krainer, A. R. Antisense Masking of an hnRNP A1/A2 Intronic Splicing Silencer Corrects SMN2 Splicing in Transgenic Mice. Am. J. Hum. Genet. 82, 834-848 (2008).
[0643] 48. Walton, R. T., Christie, K. A., Whittaker, M. N. & Kleinstiver, B. P. Unconstrained genome targeting with near-PAMless engineered CRISPR-Cas9 variants. Science (80-.). 368, 290-296 (2020).
[0644] 49. Miller, S. et al. Continuous evolution of SpCas9 variants compatible with non-G PAMs. Nat. Biotechnol. 38, 471-481 (2020).
[0645] 50. Hu, J. H. et al. Evolved Cas9 variants with broad PAM compatibility and high DNA specificity. Nature 556, 57 (2018).
[0646] 51. Nishimasu, H. et al. Engineered CRISPR-Cas9 nuclease with expanded targeting space. Science (80-.). 361, 1259 (2018).
[0647] 52. Wolstencroft, E. C., Mattis, V., Bajer, A. A., Young, P. J. & Lorson, C. L. A non-sequence-specific requirement for SMN protein activity: the role of aminoglycosides in inducing elevated SMN protein levels. doi:10.1093/hmg/ddi131
[0648] 53. Kosicki, M., Tomberg, K. & Bradley, A. Repair of double-strand breaks induced by CRISPR-Cas9 leads to large deletions and complex rearrangements. Nat. Biotechnol. 36, (2018).
[0649] 54. Zhang, L. et al. Large genomic fragment deletions and insertions in mouse using CRISPR/Cas9. PLoS One 10, (2015).
[0650] 55. Shin, H. Y. et al. CRISPR/Cas9 targeting events cause complex deletions and insertions at 17 sites in the mouse genome. Nat. Commun. 8, 1-10 (2017).
[0651] 56. Butchbach, M. E. R. Copy number variations in the survival motor neuron genes: Implications for spinal muscular atrophy and other neurodegenerative diseases. Frontiers in Molecular Biosciences 3, (2016).
[0652] 57. Lin, X. et al. Base editing-mediated splicing correction therapy for spinal muscular atrophy. Cell Research 30, 548-550 (2020).
[0653] 58. Huang, T. P. et al. Circularly permuted and PAM-modified Cas9 variants broaden the targeting scope of base editors. Nat. Biotechnol. (2019).
[0654] 59. Richter, M. F. et al. Phage-assisted evolution of an adenine base editor with improved Cas domain compatibility and activity. Nat. Biotechnol. (2020). doi:10.1038/s41587-020-0453-z
[0655] 60. Lapinaite, A. et al. DNA capture by a CRISPR-Cas9-guided adenine base editor. Science (80-.). 369, 566-571 (2020).
[0656] 61. Rees, H. A. & Liu, D. R. Base editing: precision chemistry on the genome and transcriptome of living cells. Nat Rev Genet 19, 770-788 (2018).
[0657] 62. Tsai, S. Q. et al. CIRCLE-seq: a highly sensitive in vitro screen for genome-wide CRISPR-Cas9 nuclease off-targets. Nat Methods 14, 607-614 (2017).
[0658] 63. Singh, R. N. & Singh, N. N. Mechanism of splicing regulation of spinal muscular atrophy genes. in Advances in Neurobiology 20, 31-61 (2018).
[0659] 64. Villiger, L. et al. Treatment of a metabolic liver disease by in vivo genome base editing in adult mice. Nat Med 24, 1519-1525 (2018).
[0660] 65. Ryu, S. M. et al. Adenine base editing in mouse embryos and an adult mouse model of Duchenne muscular dystrophy. Nat. Biotechnol. 36, 536-539 (2018).
[0661] 66. Levy, J. M. et al. Cytosine and adenine base editing of the brain, liver, retina, heart and skeletal muscle of mice via adeno-associated viruses. Nat. Biomed. Eng. 4, 97-110 (2020).
[0662] 67. Koblan, L. W. et al. In vivo base editing rescues Hutchinson-Gilford progeria syndrome in mice. Nature 1-7 (2021). doi:10.1038/s41586-020-03086-7
[0663] 68. Zettler, J., Schütz, V. & Mootz, H. D. The naturally split Npu DnaE intein exhibits an extraordinarily high rate in the protein trans-splicing reaction. FEBS Lett. 583, 909-914 (2009).
[0664] 69. Robbins, K. L., Glascock, J. J., Osman, E. Y., Miller, M. R. & Lorson, C. L. Defining the therapeutic window in a severe animal model of spinal muscular atrophy. Hum. Mol. Genet. 23, 4559-4568 (2014).
[0665] 70. Lutz, C. M. et al. Postsymptomatic restoration of SMN rescues the disease phenotype in a mouse model of severe spinal muscular atrophy. J. Clin. Invest. 121, 3029-3041 (2011).
[0666] 71. Hauck, B., Zhao, W., High, K. & Xiao, W. Intracellular Viral Processing, Not Single-Stranded DNA Accumulation, Is Crucial for Recombinant Adeno-Associated Virus Transduction. J. Virol. 78, 13678-13686 (2004).
[0667] 72. Zhou, X. et al. Adeno-associated virus of a single-polarity DNA genome is capable of transduction in vivo. Mol. Ther. 16, 494-499 (2008).
[0668] 73. McCarty, D. M., Monahan, P. E. & Samulski, R. J. Self-complementary recombinant adeno-associated virus (scAAV) vectors promote efficient transduction independently of DNA synthesis. Gene Ther. 8, 1248-1254 (2001).
[0669] 74. Wang, Z. et al. Rapid and highly efficient transduction by double-stranded adeno-associated virus vectors in vitro and in vivo. Gene Ther. 10, 2105-2111 (2003).
[0670] 75. Passini, M. A. et al. Antisense Oligonucleotides Delivered to the Mouse CNS Ameliorate Symptoms of Severe Spinal Muscular Atrophy. Sci. Transl. Med. 3, 72ra18-72ra18 (2011).
[0671] 76. Passini, M. A. et al. Translational fidelity of intrathecal delivery of self-complementary AAV9-survival motor neuron 1 for spinal muscular atrophy. Hum. Gene Ther. 25, 619-630 (2014).

### REFERENCES

[0672] The following references are each incorporated herein by reference in their entireties.
[0673] 1. Jinek, Lefebvre et al. Cell 80, 155-65 (1995).
[0674] 2. Pearn et al. Lancet 1, 919-922 (1980)
[0675] 3. Schrank et al. PNAS 94, 9920-5 (1997)
[0676] 4. Cartegni et al. Am J Hum Genet 78, 63-77 (2006)
[0677] 5. Wirth et al. Hum Genet 119, 422-8 (2006)
[0678] 6. Talbot et al. Semin Neurol 21 (189-197 (2001)
[0679] 7. Murray et al. Hum Mol Genet 17, 949-62 (2008)
[0680] 8. Chang et al. Neurochem Int 45, 1107-12 (2004)
[0681] 9. Cho et al. Genes Dev 24, 438-42 (2010)
[0682] 10. Sing et al. Mol Cell Biol 26, 1333-46 (2006)
[0683] 11. Porensky et al. Hum Mol Genet 21, 1625-38 (2012)
[0684] 12. Cong et al. Science 339, 819-23 (2013)
[0685] 13. Ran et al. Nature 520, 186-90 (2015)
[0686] 14. Long et al. Science 5725 (2015)
[0687] 15. Tabebordbar et al. Science 5177, 1-9 (2015)
[0688] 16. Nelson et al. Science 5143m 1-8 (2015)
[0689] 17. Corti et al. Sci Transl Med 4, 165ra162 (2012)
[0690] 18. Arbab et al. Stem Cell Reports 5, 1-10 (2015)
[0691] 19. Iyama et al. SNA Repair (Amst). 12, 620-626 (2013)
[0692] 20. Komor et al. Science 533, 420-424 (2016)
[0693] 21. Huang et al. Nature Biotech (2019)
[0694] 22. Shen et al. Nature 2018

### EQUIVALENTS AND SCOPE

[0695] In the claims articles such as “a,” “an,” and “the” may mean one or more than one unless indicated to the contrary or otherwise evident from the context. Claims or descriptions that include “or” between one or more members of a group are considered satisfied if one, more than one, or all of the group members are present in, employed in, or otherwise relevant to a given product or process unless indicated to the contrary or otherwise evident from the context. The invention includes embodiments in which exactly one member of the group is present in, employed in, or otherwise relevant to a given product or process. The invention includes embodiments in which more than one, or all of the group members are present in, employed in, or otherwise relevant to a given product or process.

[0696] Furthermore, the invention encompasses all variations, combinations, and permutations in which one or more limitations, elements, clauses, and descriptive terms from one or more of the listed claims are introduced into another claim. For example, any claim that is dependent on another claim can be modified to include one or more limitations found in any other claim that is dependent on the same base claim. Where elements are presented as lists, e.g., in Markush group format, each subgroup of the elements is also disclosed, and any element(s) can be removed from the group. It should it be understood that, in general, where the invention, or aspects of the invention, is/are referred to as comprising particular elements and/or features, certain embodiments of the invention or aspects of the invention consist, or consist essentially of, such elements and/or features. For purposes of simplicity, those embodiments have not been specifically set forth in haec verba herein. It is also noted that the terms “comprising” and “containing” are intended to be open and permits the inclusion of additional elements or steps. Where ranges are given, endpoints are included. Furthermore, unless otherwise indicated or otherwise evident from the context and understanding of one of ordinary skill in the art, values that are expressed as ranges can assume any specific value or sub-range within the stated ranges in different embodiments of the invention, to the tenth of the unit of the lower limit of the range, unless the context clearly dictates otherwise.

[0697] This application refers to various issued patents, published patent applications, journal articles, and other publications, all of which are incorporated herein by reference. If there is a conflict between any of the incorporated references and the instant specification, the specification shall control. In addition, any particular embodiment of the present invention that falls within the prior art may be explicitly excluded from any one or more of the claims. Because such embodiments are deemed to be known to one of ordinary skill in the art, they may be excluded even if the exclusion is not set forth explicitly herein. Any particular embodiment of the invention can be excluded from any claim, for any reason, whether or not related to the existence of prior art.

[0698] Those skilled in the art will recognize or be able to ascertain using no more than routine experimentation many equivalents to the specific embodiments described herein. The scope of the present embodiments described herein is not intended to be limited to the above Description, but rather is as set forth in the appended claims. Those of ordinary skill in the art will appreciate that various changes and modifications to this description may be made without departing from the spirit or scope of the present invention, as defined in the following claims.

1. A method for deaminating an adenosine nucleobase (A) in an SMN2 gene, the method comprising contacting the SMN2 gene with a base editor in association with a guide RNA (gRNA), wherein the gRNA comprises a guide sequence that is complementary to a target nucleic acid sequence in the SMN2 gene.

2. The method of claim 1, wherein the guide sequence comprises at least 10 contiguous nucleobases that are at least 80% complementary to the target nucleic acid sequence of the SMN2 gene.

3. The method of claim 1, wherein the target nucleic acid sequence in the SMN2 gene comprises the nucleic acid sequence of any one of SEQ ID NOs: 249-399, or a naturally-occurring variant thereof.

4. (canceled)

5. The method of claim 1, wherein the base editor comprises a nucleic acid programmable DNA binding protein (napDNAbp) and an adenosine deaminase.

6-7. (canceled)

8. The method of claim 5, wherein the napDNAbp comprises a circularly permuted napDNAbp.

9-11. (canceled)

12. The method of claim 1, wherein the base editor comprises a split-intein base editor.

13. (canceled)

14. The method of claim 1, wherein the base editor comprises saCas9-KKH, Cas9-VQR, Cas9-VRQR, Cas9-VRER, Cas9-NG, ABE7.7, pNMG-624, ABE3.2, ABE5.3, pNMG-558, pNMG-576, pNMG-577, pNMG-586, ABE7.2, pNMG-620, pNMG-617, pNMG-618, pNMG-620, pNMG-621, pNGM-622, pNMG-623, ABE6.3, ABE6.4, ABE7.8, ABE7.9, ABE7.10, ABEMax, ABE8e, CP1028-ABE8e, ABE7.10-CP1041, or CP1041-ABE8e.

15. The method of claim 1, wherein the guide sequence of the gRNA comprises a nucleic acid sequence selected from the group consisting of:
(SEQ ID NO: 250)
5′-AUUUUGUCUAAAACCCUGUA-3′,
(SEQ ID NO: 367)
5′-UUUGUCUAAAACCCUGUAAG-3′,
(SEQ ID NO: 369)
5′-UUUUGUCUAAAACCCUGUAA-3′,
(SEQ ID NO: 371)
5′-UGAUUUUGUCUAAAACCC-3′,
(SEQ ID NO: 373)
5′-GAUUUUGUCUAAAACCCU-3′,
(SEQ ID NO: 375)
5′-AUUUUGUCUAAAACCCUG-3′,
(SEQ ID NO: 377)
5′-GUCUAAAACCCUGUAAGG-3′,
(SEQ ID NO: 379)
5′-UCUAAAACCCUGUAAGGA-3′,
(SEQ ID NO: 382)
5′-UUUGCAGGAAAUGCUGGCAU-3′,
(SEQ ID NO: 384)
5′-UUCUCAUUUGCAGGAAAUGC-3′,
(SEQ ID NO: 386)
5′-CAUUUAGUGCUGCUCUAUGC-3′,
(SEQ ID NO: 388)
5′-CAGGAAAUGCUGGCAUAGAG-3′,
(SEQ ID NO: 390)
5′-UUGCAGGAAAUGCUGGCAUA-3′,
(SEQ ID NO: 392)
5′-AUUUGCAGGAAAUGCUGGCA-3′,
(SEQ ID NO: 393)
5′-TGGCATAGAGCAGCACTAAA-3′,
and
(SEQ ID NO: 397)
5′-UACAUGAGUGGCUAUCAUAC-3′.

16-20. (canceled)

21. The method of claim 1, wherein the gRNA comprises the nucleic acid sequence
(SEQ ID NO: 405)
5′-AUUUUGUCUAAAACCCUGUAGUUUUAGAGCUAGAAAUAGCAAGUUAA
AAUAAAGGCUAGUCCGUUAUCAACUUGAAAAAGUGGCACCGAGUCGGUGC
UUUUU-3′ ;
or
(SEQ ID NO: 406)
5′-AUUUUGUCUAAAACCCUGUAGUUUUAGAGCUAGAAAUAGCAAGUUAA
AAUAAGGCUAGUCCGUUAUCAACUUGAAAAAGUGGCACCGAGUCGGUGCU
UUUUUU-3′.

22. (canceled)

23. The method of claim 1, wherein the SMN2 gene comprises C840T.

24. The method of claim 1, wherein deaminating an adenosine nucleobase in the SMN2 gene results in a sequence that is not associated with spinal muscular atrophy (SMA).

25. The method of claim 1, wherein deaminating an adenosine nucleobase in the SMN2 gene leads to an increase in full-length SMA protein, an increase in SMA protein stability, or both.

26-29. (canceled)

30. The method of claim 1, wherein the method is performed in a subject.

31. The method of claim 30, wherein the subject has or is suspected of having spinal muscular atrophy (SMA).

32. (canceled)

33. The method of claim 30, wherein the subject is human.

34-41. (canceled)

42. The method of claim 1, wherein the base editor comprises the structure: NH₂-[first nuclear localization sequence]-[first adenosine deaminase]-[second adenosine deaminase]-[Cas9 domain]-[second nuclear localization sequence]-COOH, and each instance of “−” comprises an optional linker.

43-46. (canceled)

47. The method of claim 42, wherein the base editor comprises the amino acid sequence of SEQ ID NO: 201, or a variant thereof that is at least 70%, 75%, 80%, 85%, 90%, 95%, 96%, 97%, 98%, 99%, or 99.5% identical thereto.

48-52. (canceled)

53. A guide RNA comprising a guide sequence, wherein the guide sequence of the guide RNA comprises:
(SEQ ID NO: 367)
5′-UUUGUCUAAAACCCUGUAAG-3′,
(SEQ ID NO: 369)
5′-UUUUGUCUAAAACCCUGUAA-3′,
(SEQ ID NO: 371)
5′-UGAUUUUGUCUAAAACCC-3′,
(SEQ ID NO: 373)
5′-GAUUUUGUCUAAAACCCU-3′,
(SEQ ID NO: 375)
5′-AUUUUGUCUAAAACCCUG-3′,
(SEQ ID NO: 377)
5′-GUCUAAAACCCUGUAAGG-3′,
(SEQ ID NO: 379)
5′-UCUAAAACCCUGUAAGGA-3′,
(SEQ ID NO: 382)
5′-UUUGCAGGAAAUGCUGGCAU-3′,
(SEQ ID NO: 384)
5′-UUCUCAUUUGCAGGAAAUGC-3′,
(SEQ ID NO: 386)
5′-CAUUUAGUGCUGCUCUAUGC-3′,
(SEQ ID NO: 388)
5′-CAGGAAAUGCUGGCAUAGAG-3′,
(SEQ ID NO: 390)
5′-UUGCAGGAAAUGCUGGCAUA-3′,
(SEQ ID NO: 392)
5′-AUUUGCAGGAAAUGCUGGCA-3′,
(SEQ ID NO: 394)
5′-UGGCAUAGAGCAGCACUAAA-3′,
(SEQ ID NO: 451)
5′-GAUUUUGUCUAAAACCCUGUAAG-3′,
(SEQ ID NO: 452)
5′-UUGUCUAAAACCCUGUAAGG-3′,
(SEQ ID NO: 453)
5′-UGUCUAAAACCCUGUAAGGA-3′,
(SEQ ID NO: 454)
5′-GUCUAAAACCCUGUAAGGAA-3′,
(SEQ ID NO: 455)
5′-AAAAGUAAGAUUCACUUUCA-3′,
(SEQ ID NO: 456)
5′-CAAAAGUAAGAUUCACUUUC-3′,
(SEQ ID NO: 457)
5′-ACAAAAGUAAGAUUCACUUU-3′,
(SEQ ID NO: 458)
5′-UACAAAAGUAAGAUUCACUU-3′,
(SEQ ID NO: 365)
5′-AUUUUGUCUAAAACCCUGUA-3′,
or
(SEQ ID NO: 397)
5′-UACAUGAGUGGCUAUCAUAC-3′.

54-57. (canceled)

58. A nucleic acid encoding the guide RNA of claim 53.

59. A complex comprising (i) a base editor, and (ii) the guide RNA of claim 53.

60-61. (canceled)

62. A pharmaceutical composition comprising the complex of claim 59.

63-71. (canceled)

72. A virus comprising a nucleic acid encoding
(i) a base editor, and (ii) the guide RNA of claim 53.

73-104. (canceled)

The application's sequence listing, which the Patent Office published only in electronic form, follows.

SEQUENCE LISTING (574 sequences)

SEQ ID NO: 1 - DNA, 1571 bp, Homo Sapiens
ccacaaatgtgggagggcgataaccactcgtagaaagcgtgagaagttactacaagcggtcctcccggccaccgtactgttccgctcccagaagccccgggcggcggaagtcgtcactcttaagaagggacggggccccacgctgcgcacccgcgggtttgctatggcgatgagcagcggcggcagtggtggcggcgtcccggagcaggaggattccgtgctgttccggcgcggcacaggccagagcgatgattctgacatttgggatgatacagcactgataaaagcatatgataaagctgtggcttcatttaagcatgctctaaagaatggtgacatttgtgaaacttcgggtaaaccaaaaaccacacctaaaagaaaacctgctaagaagaataaaagccaaaagaagaatactgcagcttccttacaacagtggaaagttggggacaaatgttctgccatttggtcagaagacggttgcatttacccagctaccattgcttcaattgattttaagagagaaacctgtgttgtggtttacactggatatggaaatagagaggagcaaaatctgtccgatctactttccccaatctgtgaagtagctaataatatagaacaaaatgctcaagagaatgaaaatgaaagccaagtttcaacagatgaaagtgagaactccaggtctcctggaaataaatcagataacatcaagcccaaatctgctccatggaactcttttctccctccaccaccccccatgccagggccaagactgggaccaggaaagccaggtctaaaattcaatggcccaccaccgccaccgccaccaccaccaccccacttactatcatgctggctgcctccatttccttctggaccaccaataattcccccaccacctcccatatgtccagattctcttgatgatgctgatgctttgggaagtatgttaatttcatggtacatgagtggctatcatactggctattatatggaaatgctggcatagagcagcactaaatgacaccactaaagaaacgatcagacagatctggaatgtgaagcgttatagaagataactggcctcatttcttcaaaatatcaagtgttgggaaagaaaaaaggaagtggaatgggtaactcttcttgattaaaagttatgtaataaccaaatgcaatgtgaaatattttactggactctattttgaaaaaccatctgtaaaagactggggtgggggtgggaggccagcacggtggtgaggcagttgagaaaatttgaatgtggattagattttgaatgatattggataattattggtaattttatgagctgtgagaagggtgttgtagtttataaaagactgtcttaatttgcatacttaagcatttaggaatgaagtgttagagtgtcttaaaatgtttcaaatggtttaacaaaatgtatgtgaggcgtatgtggcaaaatgttacagaatctaactggtggacatggctgttcattgtactgtttttttctatcttctatatgtttaaaagtatataataaaaatatttaatttttttttaaa

SEQ ID NO: 2 - protein, 294 aa, Homo Sapiens
MAMSSGGSGGGVPEQEDSVLFRRGTGQSDDSDIWDDTALIKAYDKAVASFKHALKNGDICETSGKPKTTPKRKPAKKNKSQKKNTAASLQQWKVGDKCSAIWSEDGCIYPATIASIDFKRETCVVVYTGYGNREEQNLSDLLSPICEVANNIEQNAQENENESQVSTDESENSRSPGNKSDNIKPKSAPWNSFLPPPPPMPGPRLGPGKPGLKFNGPPPPPPPPPPHLLSCWLPPFPSGPPIIPPPPPICPDSLDDADALGSMLISWYMSGYHTGYYMGFRQNQKEGRCSHSLN

SEQ ID NO: 3 - DNA, 1428 bp, Homo Sapiens
gcacccgcgggtttgctatggcgatgagcagcggcggcagtggtggcggcgtcccggagcaggaggattccgtgctgttccggcgcggcacaggccagagcgatgattctgacatttgggatgatacagcactgataaaagcatatgataaagctgtggcttcatttaagcatgctctaaagaatggtgacatttgtgaaacttcgggtaaaccaaaaaccacacctaaaagaaaacctgctaagaagaataaaagccaaaagaagaatactgcagcttccttacaacagtggaaagttggggacaaatgttctgccatttggtcagaagacggttgcatttacccagctaccattgcttcaattgattttaagagagaaacctgtgttgtggtttacactggatatggaaatagagaggagcaaaatctgtccgatctactttccccaatctgtgaagtagctaataatatagaacaaaatgctcaagagaatgaaaatgaaagccaagtttcaacagatgaaagtgagaactccaggtctcctggaaataaatcagataacatcaagcccaaatctgctccatggaactcttttctccctccaccaccccccatgccagggccaagactgggaccaggaaagccaggtctaaaattcaatggcccaccaccgccaccgccaccaccaccaccccacttactatcatgctggctgcctccatttccttctggaccaccaataattcccccaccacctcccatatgtccagattctcttgatgatgctgatgctttgggaagtatgttaatttcatggtacatgagtggctatcatactggctattatatggaaatgctggcatagagcagcactaaatgacaccactaaagaaacgatcagacagatctggaatgtgaagcgttatagaagataactggcctcatttcttcaaaatatcaagtgttgggaaagaaaaaaggaagtggaatgggtaactcttcttgattaaaagttatgtaataaccaaatgcaatgtgaaatattttactggactctattttgaaaaaccatctgtaaaagactgaggtgggggtgggaggccagcacggtggtgaggcagttgagaaaatttgaatgtggattagattttgaatgatattggataattattggtaattttatgagctgtgagaagggtgttgtagtttataaaagactgtcttaatttgcatacttaagcatttaggaatgaagtgttagagtgtcttaaaatgtttcaaatggtttaacaaaatgtatgtgaggcgtatgtggcaaaatgttacagaatctaactggtggacatggctgttcattgtactgtttttttctatcttctatatgtttaaaagtatataataaaaatatttaatttttttttaaatta

SEQ ID NO: 4 - protein, 282 aa, Homo Sapiens
MAMSSGGSGGGVPEQEDSVLFRRGTGQSDDSDIWDDTALIKAYDKAVASFKHALKNGDICETSGKPKTTPKRKPAKKNKSQKKNTAASLQQWKVGDKCSAIWSEDGCIYPATIASIDFKRETCVVVYTGYGNREEQNLSDLLSPICEVANNIEQNAQENENESQVSTDESENSRSPGNKSDNIKPKSAPWNSFLPPPPPMPGPRLGPGKPGLKFNGPPPPPPPPPPHLLSCWLPPFPSGPPIIPPPPPICPDSLDDADALGSMLISWYMSGYHTGYYMEMLA

SEQ ID NO: 5 - protein, 1368 aa, Streptococcus pyogenes [sequence omitted]

SEQ ID NO: 6 - DNA, 4104 bp, Streptococcus pyogenes
atggataaaaaatatagcattggcctggatattggcaccaacagcgtgggctgggcggtgattaccgatgaatataaagtgccgagcaaaaaatttaaagtgctgggcaacaccgatcgccatagcattaaaaaaaacctgattggcgcgctgctgtttgatagcggcgaaaccgcggaagcgacccgcctgaaacgcaccgcgcgccgccgctatacccgccgcaaaaaccgcatttgctatctgcaggaaatttttagcaacgaaatggcgaaagtggatgatagcttttttcatcgcctggaagaaagctttctggtggaagaagataaaaaacatgaacgccatccgatttttggcaacattgtggatgaagtggcgtatcatgaaaaatatccgaccatttatcatctgcgcaaaaaactggtggatagcaccgataaagcggatctgcgcctgatttatctggcgctggcgcatatgattaaatttcgcggccattttctgattgaaggcgatctgaacccggataacagcgatgtggataaactgtttattcagctggtgcagacctataaccagctgtttgaagaaaacccgattaacgcgagcggcgtggatgcgaaagcgattctgagcgcgcgcctgagcaaaagccgccgcctggaaaacctgattgcgcagctgccgggcgaaaaaaaaaacggcctgtttggcaacctgattgcgctgagcctgggcctgaccccgaactttaaaagcaactttgatctggcggaagatgcgaaactgcagctgagcaaagatacctatgatgatgatctggataacctgctggcgcagattggcgatcagtatgcggatctgtttctggcggcgaaaaacctgagcgatgcgattctgctgagcgatattctgcgcgtgaacaccgaaattaccaaagcgccgctgagcgcgagcatgattaaacgctatgatgaacatcatcaggatctgaccctgctgaaagcgctggtgcgccagcagctgccggaaaaatataaagaaattttttttgatcagagcaaaaacggctatgcgggctatattgatggcggcgcgagccaggaagaattttataaatttattaaaccgattctggaaaaaatggatggcaccgaagaactgctggtgaaactgaaccgcgaagatctgctgcgcaaacagcgcacctttgataacggcagcattccgcatcagattcatctgggcgaactgcatgcgattctgcgccgccaggaagatttttatccgtttctgaaagataaccgcgaaaaaattgaaaaaattctgacctttcgcattccgtattatgtgggcccgctggcgcgcggcaacagccgctttgcgtggatgacccgcaaaagcgaagaaaccattaccccgtggaactttgaagaagtggtggataaaggcgcgagcgcgcagagctttattgaacgcatgaccaactttgataaaaacctgccgaacgaaaaagtgctgccgaaacatagcctgctgtatgaatattttaccgtgtataacgaactgaccaaagtgaaatatgtgaccgaaggcatgcgcaaaccggcgtttctgagcggcgaacagaaaaaagcgattgtggatctgctgtttaaaaccaaccgcaaagtgaccgtgaaacagctgaaagaagattattttaaaaaaattgaatgctttgatagcgtggaaattagcggcgtggaagatcgctttaacgcgagcctgggcacctatcatgatctgctgaaaattattaaagataaagattttctggataacgaagaaaacgaagatattctggaagatattgtgctgaccctgaccctgtttgaagatcgcgaaatgattgaagaacgcctgaaaacctatgcgcatctgtttgatgataaagtgatgaaacagctgaaacgccgccgctataccggctggggccgcctgagccgcaaactgattaacggcattcgcgataaacagagcggcaaaaccattctggattttctgaaaagcgatggctttgcgaaccgcaactttatgcagctgattcatgatgatagcctgacctttaaagaagatattcagaaagcgcaggtgagcggccagggcgatagcctgcatgaacatattgcgaacctggcgggcagcccggcgattaaaaaaggcattctgcagaccgtgaaagtggtggatgaactggtgaaagtgatgggccgccataaaccggaaaacattgtgattgaaatggcgcgcgaaaaccagaccacccagaaaggccagaaaaacagccgcgaacgcatgaaacgcattgaagaaggcattaaagaactgggcagccagattctgaaagaacatccggtggaaaacacccagctgcagaacgaaaaactgtatctgtattatctgcagaacggccgcgatatgtatgtggatcaggaactggatattaaccgcctgagcgattatgatgtggatcatattgtgccgcagagctttctgaaagatgatagcattgataacaaagtgctgacccgcagcgataaaaaccgcggcaaaagcgataacgtgccgagcgaagaagtggtgaaaaaaatgaaaaactattggcgccagctgctgaacgcgaaactgattacccagcgcaaatttgataacctgaccaaagcggaacgcggcggcctgagcgaactggataaagcgggctttattaaacgccagctggtggaaacccgccagattaccaaacatgtggcgcagattctggatagccgcatgaacaccaaatatgatgaaaacgataaactgattcgcgaagtgaaagtgattaccctgaaaagcaaactggtgagcgattttcgcaaagattttcagttttataaagtgcgcgaaattaacaactatcatcatgcgcatgatgcgtatctgaacgcggtggtgggcaccgcgctgattaaaaaatatccgaaactggaaagcgaatttgtgtatggcgattataaagtgtatgatgtgcgcaaaatgattgcgaaaagcgaacaggaaattggcaaagcgaccgcgaaatattttttttatagcaacattatgaacttttttaaaaccgaaattaccctggcgaacggcgaaattcgcaaacgcccgctgattgaaaccaacggcgaaaccggcgaaattgtgtgggataaaggccgcgattttgcgaccgtgcgcaaagtgctgagcatgccgcaggtgaacattgtgaaaaaaaccgaagtgcagaccggcggctttagcaaagaaagcattctgccgaaacgcaacagcgataaactgattgcgcgcaaaaaagattgggatccgaaaaaatatggcggctttgatagcccgaccgtggcgtatagcgtgctggtggtggcgaaagtggaaaaaggcaaaagcaaaaaactgaaaagcgtgaaagaactgctgggcattaccattatggaacgcagcagctttgaaaaaaacccgattgattttctggaagcgaaaggctataaagaagtgaaaaaagatctgattattaaactgccgaaatatagcctgtttgaactggaaaacggccgcaaacgcatgctggcgagcgcgggcgaactgcagaaaggcaacgaactggcgctgccgagcaaatatgtgaactttctgtatctggcgagccattatgaaaaactgaaaggcagcccggaagataacgaacagaaacagctgtttgtggaacagcataaacattatctggatgaaattattgaacagattagcgaatttagcaaacgcgtgattctggcggatgcgaacctggataaagtgctgagcgcgtataacaaacatcgcgataaaccgattcgcgaacaggcggaaaacattattcatctgtttaccctgaccaacctgggcgcgccggcggcgtttaaatattttgataccaccattgatcgcaaacgctataccagcaccaaagaagtgctggatgcgaccctgattcatcagagcattaccggcctgtatgaaacccgcattgatctgagccagctgggcggcgat

SEQ ID NO: 7 - DNA, 4104 bp, Streptococcus pyogenes
atggataagaaatactcaataggcttagatatcggcacaaatagcgtcggatgggcggtgatcactgatgattataaggttccgtctaaaaagttcaaggttctgggaaatacagaccgccacagtatcaaaaaaaatcttataggggctcttttatttggcagtggagagacagcggaagcgactcgtctcaaacggacagctcgtagaaggtatacacgtcggaagaatcgtatttgttatctacaggagattttttcaaatgagatggcgaaagtagatgatagtttctttcatcgacttgaagagtcttttttggtggaagaagacaagaagcatgaacgtcatcctatttttggaaatatagtagatgaagttgcttatcatgagaaatatccaactatctatcatctgcgaaaaaaattggcagattctactgataaagcggatttgcgcttaatctatttggccttagcgcatatgattaagtttcgtggtcattttttgattgagggagatttaaatcctgataatagtgatgtggacaaactatttatccagttggtacaaatctacaatcaattatttgaagaaaaccctattaacgcaagtagagtagatgctaaagcgattctttctgcacgattgagtaaatcaagacgattagaaaatctcattgctcagctccccggtgagaagagaaatggcttgtttgggaatctcattgctttgtcattgggattgacccctaattttaaatcaaattttgatttggcagaagatgctaaattacagctttcaaaagatacttacgatgatgatttagataatttattggcgcaaattggagatcaatatgctgatttgtttttggcagctaagaatttatcagatgctattttactttcagatatcctaagagtaaatagtgaaataactaaggctcccctatcagcttcaatgattaagcgctacgatgaacatcatcaagacttgactcttttaaaagctttagttcgacaacaacttccagaaaagtataaagaaatcttttttgatcaatcaaaaaacggatatgcaggttatattgatgggggagctagccaagaagaattttataaatttatcaaaccaattttagaaaaaatggatggtactgaggaattattggtgaaactaaatcgtgaagatttgctgcgcaagcaacggacctttgacaacggctctattccccatcaaattcacttgggtgagctgcatgctattttgagaagacaagaagacttttatccatttttaaaagacaatcgtgagaagattgaaaaaatcttgacttttcgaattccttattatgttggtccattggcgcgtggcaatagtcgttttgcatggatgactcggaagtctgaagaaacaattaccccatggaattttgaagaagttgtcgataaaggtgcttcagctcaatcatttattgaacgcatgacaaactttgataaaaatcttccaaatgaaaaagtactaccaaaacatagtttgctttatgagtattttacggtttataacgaattgacaaaggtcaaatatgttactgagggaatgcgaaaaccagcatttctttcaggtgaacagaagaaagccattgttgatttactcttcaaaacaaatcgaaaagtaaccgttaagcaattaaaagaagattatttcaaaaaaatagaatgttttgatagtgttgaaatttcaggagttgaagatagatttaatgcttcattaggcgcctaccatgatttgctaaaaattattaaagataaagattttttggataatgaagaaaatgaagatatcttagaggatattgttttaacattgaccttatttgaagatagggggatgattgaggaaagacttaaaacatatgctcacctctttgatgataaggtgatgaaacagcttaaacgtcgccgttatactggttggggacgtttgtctcgaaaattgattaatggtattagggataagcaatctggcaaaacaatattagattttttgaaatcagatggttttgccaatcgcaattttatgcagctgatccatgatgatagtttgacatttaaagaagatattcaaaaagcacaggtgtctggacaaggccatagtttacatgaacagattgctaacttagctggcagtcctgctattaaaaaaggtattttacagactgtaaaaattgttgatgaactggtcaaagtaatggggcataagccagaaaatatcgttattgaaatggcacgtgaaaatcagacaactcaaaagggccagaaaaattcgcgagagcgtatgaaacgaatcgaagaaggtatcaaagaattaggaagtcagattcttaaagagcatcctgttgaaaatactcaattgcaaaatgaaaagctctatctctattatctacaaaatggaagagacatgtatgtggaccaagaattagatattaatcgtttaagtgattatgatgtcgatcacattgttccacaaagtttcattaaagacgattcaatagacaataaggtactaacgcgttctgataaaaatcgtggtaaatcggataacgttccaagtgaagaagtagtcaaaaagatgaaaaactattggagacaacttctaaacgccaagttaatcactcaacgtaagtttgataatttaacgaaagctgaacgtggaggtttgagtgaacttgataaagctggttttatcaaacgccaattggttgaaactcgccaaatcactaagcatgtggcacaaattttggatagtcgcatgaatactaaatacgatgaaaatgataaacttattcgagaggttaaagtgattaccttaaaatctaaattagtttctgacttccgaaaagatttccaattctataaagtacgtgagattaacaattaccatcatgcccatgatgcgtatctaaatgccgtcgttggaactgctttgattaagaaatatccaaaacttgaatcggagtttgtctatggtgattataaagtttatgatgttcgtaaaatgattgctaagtctgagcaagaaataggcaaagcaaccgcaaaatatttcttttactctaatatcatgaacttcttcaaaacagaaattacacttgcaaatggagagattcgcaaacgccctctaatcgaaactaatggggaaactggagaaattgtctgggataaagggcgagattttgccacagtgcgcaaagtattgtccatgccccaagtcaatattgtcaagaaaacagaagtacagacaggcggattctccaaggagtcaattttaccaaaaagaaattcggacaagcttattgctcgtaaaaaagactgggatccaaaaaaatatggtggttttgatagtccaacggtagcttattcagtcctagtggttgctaaggtggaaaaagggaaatcgaagaagttaaaatccgttaaagagttactagggatcacaattatggaaagaagttcctttgaaaaaaatccgattgactttttagaagctaaaggatataaggaagttaaaaaagacttaatcattaaactacctaaatatagtctttttgagttagaaaacggtcgtaaacggatgctggctagtgccggagaattacaaaaaggaaatgagctggctctgccaagcaaatatgtgaattttttatatttagctagtcattatgaaaagttgaagggtagtccagaagataacgaacaaaaacaattgtttgtggagcagcataagcattatttagatgagattattgagcaaatcagtgaattttctaagcgtgttattttagcagatgccaatttagataaagttcttagtgcatataacaaacatagagacaaaccaatacgtgaacaagcagaaaatattattcatttatttacgttgacgaatcttggagctcccgctgcttttaaatattttgatacaacaattgatcgtaaacgatatacgtctacaaaagaagttttagatgccactcttatccatcaatccatcactggtctttatgaaacacgcattgatttgagtcagctaggaggtgactga

SEQ ID NO: 8 - protein, 1367 aa, Streptococcus pyogenes
MDKKYSIGLDIGTNSVGWAVITDDYKVPSKKFKVLGNTDRHSIKKNLIGALLFGSGETAEATRLKRTARRRYTRRKNRICYLQEIFSNEMAKVDDSFFHRLEESFLVEEDKKHERHPIFGNIVDEVAYHEKYPTIYHLRKKLADSTDKADLRLIYLALAHMIKFRGHFLIEGDLNPDNSDVDKLFIQLVQIYNQLFEENPINASRVDAKAILSARLSKSRRLENLIAQLPGEKRNGLFGNLIALSLGLTPNFKSNFDLAEDAKLQLSKDTYDDDLDNLLAQIGDQYADLFLAAKNLSDAILLSDILRVNSEITKAPLSASMIKRYDEHHQDLTLLKALVRQQLPEKYKEIFFDQSKNGYAGYIDGGASQEEFYKFIKPILEKMDGTEELLVKLNREDLLRKQRTFDNGSIPHQIHLGELHAILRRQEDFYPFLKDNREKIEKILTFRIPYYVGPLARGNSRFAWMTRKSEETITPWNFEEVVDKGASAQSFIERMTNFDKNLPNEKVLPKHSLLYEYFTVYNELTKVKYVTEGMRKPAFLSGEQKKAIVDLLFKTNRKVTVKQLKEDYFKKIECFDSVEISGVEDRFNASLGAYHDLLKIIKDKDFLDNEENEDILEDIVLTLTLFEDRGMIEERLKTYAHLFDDKVMKQLKRRRYTGWGRLSRKLINGIRDKQSGKTILDFLKSDGFANRNFMQLIHDDSLTFKEDIQKAQVSGQGHSLHEQIANLAGSPAIKKGILQTVKIVDELVKVMGHKPENIVIEMARENQTTQKGQKNSRERMKRIEEGIKELGSQILKEHPVENTQLQNEKLYLYYLQNGRDMYVDQELDINRLSDYDVDHIVPQSFIKDDSIDNKVLTRSDKNRGKSDNVPSEEVVKKMKNYWRQLLNAKLITQRKFDNLTKAERGGLSELDKAGFIKRQLVETRQITKHVAQILDSRMNTKYDENDKLIREVKVITLKSKLVSDFRKDFQFYKVREINNYHHAHDAYLNAVVGTALIKKYPKLESEFVYGDYKVYDVRKMIAKSEQEIGKATAKYFFYSNIMNFFKTEITLANGEIRKRPLIETNGETGEIVWDKGRDFATVRKVLSMPQVNIVKKTEVQTGGFSKESILPKRNSDKLIARKKDWDPKKYGGFDSPTVAYSVLVVAKVEKGKSKKLKSVKELLGITIMERSSFEKNPIDFLEAKGYKEVKKDLIIKLPKYSLFELENGRKRMLASAGELQKGNELALPSKYVNFLYLASHYEKLKGSPEDNEQKQLFVEQHKHYLDEIIEQISEFSKRVILADANLDKVLSAYNKHRDKPIREQAENIIHLFTLTNLGAPAAFKYFDTTIDRKRYTSTKEVLDATLIHQSITGLYETRIDLSQLGGD

SEQ ID NO: 9 - DNA, 4212 bp, Streptococcus pyogenes
atggataaaaagtattctattggtttagacatcggcactaattccgttggatgggctgtcataaccgatgaatacaaagtaccttcaaagaaatttaaggtgttggggaacacagaccgtcattcgattaaaaagaatcttatcggtgccctcctattcgatagtggcgaaacggcagaggcgactcgcctgaaacgaaccgctcggagaaggtatacacgtcgcaagaaccgaatatgttacttacaagaaatttttagcaatgagatggccaaagttgacgattctttctttcaccgtttggaagagtccttccttgtcgaagaggacaagaaacatgaacggcaccccatctttggaaacatagtagatgaggtggcatatcatgaaaagtacccaacgatttatcacctcagaaaaaagctagttgactcaactgataaagcggacctgaggttaatctacttggctcttgcccatatgataaagttccgtgggcactttctcattgagggtgatctaaatccggacaactcggatgtcgacaaactgttcatccagttagtacaaacctataatcagttgtttgaagagaaccctataaatgcaagtggcgtggatgcgaaggctattcttagcgcccgcctctctaaatcccgacggctagaaaacctgatcgcacaattacccggagagaagaaaaatgggttgttcggtaaccttatagcgctctcactaggcctgacaccaaattttaagtcgaacttcgacttagctgaagatgccaaattgcagcttagtaaggacacgtacgatgacgatctcgacaatctactggcacaaattggagatcagtatgcggacttatttttggctgccaaaaaccttagcgatgcaatcctcctatctgacatactgagagttaatactgagattaccaaggcgccgttatccgcttcaatgatcaaaaggtacgatgaacatcaccaagacttgacacttctcaaggccctagtccgtcagcaactgcctgagaaatataaggaaatattctttgatcagtcgaaaaacgggtacgcaggttatattgacggcggagcgagtcaagaggaattctacaagtttatcaaacccatattagagaagatggatgggacggaagagttgcttgtaaaactcaatcgcgaagatctactgcgaaagcagcggactttcgacaacggtagcattccacatcaaatccacttaggcgaattgcatgctatacttagaaggcaggaggatttttatccgttcctcaaagacaatcgtgaaaagattgagaaaatcctaacctttcgcataccttactatgtgggacccctggcccgagggaactctcggttcgcatggatgacaagaaagtccgaagaaacgattactccatggaattttgaggaagttgtcgataaaggtgcgtcagctcaatcgttcatcgagaggatgaccaactttgacaagaatttaccgaacgaaaaagtattgcctaagcacagtttactttacgagtatttcacagtgtacaatgaactcacgaaagttaagtatgtcactgagggcatgcgtaaacccgcctttctaagcggagaacagaagaaagcaatagtagatctgttattcaagaccaaccgcaaagtgacagttaagcaattgaaagaggactactttaagaaaattgaatgcttcgattctgtcgagatctccggggtagaagatcgatttaatgcgtcacttggtacgtatcatgacctcctaaagataattaaagataaggacttcctggataacgaagagaatgaagatatcttagaagatatagtgttgactcttaccctctttgaagatcgggaaatgattgaggaaagactaaaaacatacgctcacctgttcgacgataaggttatgaaacagttaaagaggcgtcgctatacgggctggggacgattgtcgcggaaacttatcaacgggataagagacaagcaaagtggtaaaactattctcgattttctaaagagcgacggcttcgccaataggaactttatgcagctgatccatgatgactctttaaccttcaaagaggatatacaaaaggcacaggtttccggacaaggggactcattgcacgaacatattgcgaatcttgctggttcgccagccatcaaaaagggcatactccagacagtcaaagtagtggatgagctagttaaggtcatgggacgtcacaaaccggaaaacattgtaatcgagatggcacgcgaaaatcaaacgactcagaaggggcaaaaaaacagtcgagagcggatgaagagaatagaagagggtattaaagaactgggcagccagatcttaaaggagcatcctgtggaaaatacccaattgcagaacgagaaactttacctctattacctacaaaatggaagggacatgtatgttgatcaggaactggacataaaccgtttatctgattacgacgtcgatcacattgtaccccaatcctttttgaaggacgattcaatcgacaataaagtgcttacacgctcggataagaaccgagggaaaagtgacaatgttccaagcgaggaagtcgtaaagaaaatgaagaactattggcggcagctcctaaatgcgaaactgataacgcaaagaaagttcgataacttaactaaagctgagaggggtggcttgtctgaacttgacaaggccggatttattaaacgtcagctcgtggaaacccgccaaatcacaaagcatgttgcacagatactagattcccgaatgaatacgaaatacgacgagaacgataagctgattcgggaagtcaaagtaatcactttaaagtcaaaattggtgtcggacttcagaaaggattttcaattctataaagttagggagataaataactaccaccatgcgcacgacgcttatcttaatgccgtcgtagggaccgcactcattaagaaatacccgaagctagaaagtgagtttgtgtatggtgattacaaagtttatgacgtccgtaagatgatcgcgaaaagcgaacaggagataggcaaggctacagccaaatacttcttttattctaacattatgaatttctttaagacggaaatcactctggcaaacggagagatacgcaaacgacctttaattgaaaccaatggggagacaggtgaaatcgtatgggataagggccgggacttcgcgacggtgagaaaagttttgtccatgccccaagtcaacatagtaaagaaaactgaggtgcagaccggagggttttcaaaggaatcgattcttccaaaaaggaatagtgataagctcatcgctcgtaaaaaggactgggacccgaaaaagtacggtggcttcgatagccctacagttgcctattctgtcctagtagtggcaaaagttgagaagggaaaatccaagaaactgaagtcagtcaaagaattattggggataacgattatggagcgctcgtcttttgaaaagaaccccatcgacttccttgaggcgaaaggttacaaggaagtaaaaaaggatctcataattaaactaccaaagtatagtctgtttgagttagaaaatggccgaaaacggatgttggctagcgccggagagcttcaaaaggggaacgaactcgcactaccgtctaaatacgtgaatttcctgtatttagcgtcccattacgagaagttgaaaggttcacctgaagataacgaacagaagcaactttttgttgagcagcacaaacattatctcgacgaaatcatagagcaaatttcggaattcagtaagagagtcatcctagctgatgccaatctggacaaagtattaagcgcatacaacaagcacagggataaacccatacgtgagcaggcggaaaatattatccatttgtttactcttaccaacctcggcgctccagccgcattcaagtattttgacacaacgatagatcgcaaacgatacacttctaccaaggaggtgctagacgcgacactgattcaccaatccatcacgggattatatgaaactcggatagatttgtcacagcttgggggtgacggatcccccaagaagaagaggaaagtctcgagcgactacaaagaccatgacggtgattataaagatcatgacatcgattacaaggatgacgatgacaaggctgcagga

SEQ ID NO: 10 - protein, 1404 aa, Streptococcus pyogenes
MDKKYSIGLDIGTNSVGWAVITDEYKVPSKKFKVLGNTDRHSIKKNLIGALLFDSGETAEATRLKRTARRRYTRRKNRICYLQEIFSNEMAKVDDSFFHRLEESFLVEEDKKHERHPIFGNIVDEVAYHEKYPTIYHLRKKLVDSTDKADLRLIYLALAHMIKFRGHFLIEGDLNPDNSDVDKLFIQLVQTYNQLFEENPINASGVDAKAILSARLSKSRRLENLIAQLPGEKKNGLFGNLIALSLGLTPNFKSNFDLAEDAKLQLSKDTYDDDLDNLLAQIGDQYADLFLAAKNLSDAILLSDILRVNTEITKAPLSASMIKRYDEHHQDLTLLKALVRQQLPEKYKEIFFDQSKNGYAGYIDGGASQEEFYKFIKPILEKMDGTEELLVKLNREDLLRKQRTFDNGSIPHQIHLGELHAILRRQEDFYPFLKDNREKIEKILTFRIPYYVGPLARGNSRFAWMTRKSEETITPWNFEEVVDKGASAQSFIERMTNFDKNLPNEKVLPKHSLLYEYFTVYNELTKVKYVTEGMRKPAFLSGEQKKAIVDLLFKTNRKVTVKQLKEDYFKKIECFDSVEISGVEDRFNASLGTYHDLLKIIKDKDFLDNEENEDILEDIVLTLTLFEDREMIEERLKTYAHLFDDKVMKQLKRRRYTGWGRLSRKLINGIRDKQSGKTILDFLKSDGFANRNFMQLIHDDSLTFKEDIQKAQVSGQGDSLHEHIANLAGSPAIKKGILQTVKVVDELVKVMGRHKPENIVIEMARENQTTQKGQKNSRERMKRIEEGIKELGSQILKEHPVENTQLQNEKLYLYYLQNGRDMYVDQELDINRLSDYDVDHIVPQSFLKDDSIDNKVLTRSDKNRGKSDNVPSEEVVKKMKNYWRQLLNAKLITQRKFDNLTKAERGGLSELDKAGFIKRQLVETRQITKHVAQILDSRMNTKYDENDKLIREVKVITLKSKLVSDFRKDFQFYKVREINNYHHAHDAYLNAVVGTALIKKYPKLESEFVYGDYKVYDVRKMIAKSEQEIGKATAKYFFYSNIMNFFKTEITLANGEIRKRPLIETNGETGEIVWDKGRDFATVRKVLSMPQVNIVKKTEVQTGGFSKESILPKRNSDKLIARKKDWDPKKYGGFDSPTVAYSVLVVAKVEKGKSKKLKSVKELLGITIMERSSFEKNPIDFLEAKGYKEVKKDLIIKLPKYSLFELENGRKRMLASAGELQKGNELALPSKYVNFLYLASHYEKLKGSPEDNEQKQLFVEQHKHYLDEIIEQISEFSKRVILADANLDKVLSAYNKHRDKPIREQAENIIHLFTLTNLGAPAAFKYFDTTIDRKRYTSTKEVLDATLIHQSITGLYETRIDLSQLGGDGSPKKKRKVSSDYKDHDGDYKDHDIDYKDDDDKAAG

SEQ ID NO: 11 - DNA, 4107 bp, Streptococcus pyogenes
atggataagaaatactcaataggcttagatatcggcacaaatagcgtcggatgggcggtgatcactgatgaatataaggttccgtctaaaaagttcaaggttctgggaaatacagaccgccacagtatcaaaaaaaatcttataggggctcttttatttgacagtggagagacagcggaagcgactcgtctcaaacggacagctcgtagaaggtatacacgtcggaagaatcgtatttgttatctacaggagattttttcaaatgagatggcgaaagtagatgatagtttctttcatcgacttgaagagtcttttttggtggaagaagacaagaagcatgaacgtcatcctatttttggaaatatagtagatgaagttgcttatcatgagaaatatccaactatctatcatctgcgaaaaaaattggtagattctactgataaagcggatttgcgcttaatctatttggccttagcgcatatgattaagtttcgtggtcattttttgattgagggagatttaaatcctgataatagtgatgtggacaaactatttatccagttggtacaaacctacaatcaattatttgaagaaaaccctattaacgcaagtggagtagatgctaaagcgattctttctgcacgattgagtaaatcaagacgattagaaaatctcattgctcagctccccggtgagaagaaaaatggcttatttgggaatctcattgctttgtcattgggtttgacccctaattttaaatcaaattttgatttggcagaagatgctaaattacagctttcaaaagatacttacgatgatgatttagataatttattggcgcaaattggagatcaatatgctgatttgtttttggcagctaagaatttatcagatgctattttactttcagatatcctaagagtaaatactgaaataactaaggctcccctatcagcttcaatgattaaacgctacgatgaacatcatcaagacttgactcttttaaaagctttagttcgacaacaacttccagaaaagtataaagaaatcttttttgatcaatcaaaaaacggatatgcaggttatattgatgggggagctagccaagaagaattttataaatttatcaaaccaattttagaaaaaatggatggtactgaggaattattggtgaaactaaatcgtgaagatttgctgcgcaagcaacggacctttgacaacggctctattccccatcaaattcacttgggtgagctgcatgctattttgagaagacaagaagacttttatccatttttaaaagacaatcgtgagaagattgaaaaaatcttgacttttcgaattccttattatgttggtccattggcgcgtggcaatagtcgttttgcatggatgactcggaagtctgaagaaacaattaccccatggaattttgaagaagttgtcgataaaggtgcttcagctcaatcatttattgaacgcatgacaaactttgataaaaatcttccaaatgaaaaagtactaccaaaacatagtttgctttatgagtattttacggtttataacgaattgacaaaggtcaaatatgttactgaaggaatgcgaaaaccagcatttctttcaggtgaacagaagaaagccattgttgatttactcttcaaaacaaatcgaaaagtaaccgttaagcaattaaaagaagattatttcaaaaaaatagaatgttttgatagtgttgaaatttcaggagttgaagatagatttaatgcttcattaggtacctaccatgatttgctaaaaattattaaagataaagattttttggataatgaagaaaatgaagatatcttagaggatattgttttaacattgaccttatttgaagatagggagatgattgaggaaagacttaaaacatatgctcacctctttgatgataaggtgatgaaacagcttaaacgtcgccgttatactggttggggacgtttgtctcgaaaattgattaatggtattagggataagcaatctggcaaaacaatattagattttttgaaatcagatggttttgccaatcgcaattttatgcagctgatccatgatgatagtttgacatttaaagaagacattcaaaaagcacaagtgtctggacaaggcgatagtttacatgaacatattgcaaatttagctggtagccctgctattaaaaaaggtattttacagactgtaaaagttgttgatgaattggtcaaagtaatggggcggcataagccagaaaatatcgttattgaaatggcacgtgaaaatcagacaactcaaaagggccagaaaaattcgcgagagcgtatgaaacgaatcgaagaaggtatcaaagaattaggaagtcagattcttaaagagcatcctgttgaaaatactcaattgcaaaatgaaaagctctatctctattatctccaaaatggaagagacatgtatgtggaccaagaattagatattaatcgtttaagtgattatgatgtcgatcacattgttccacaaagtttccttaaagacgattcaatagacaataaggtcttaacgcgttctgataaaaatcgtggtaaatcggataacgttccaagtgaagaagtagtcaaaaagatgaaaaactattggagacaacttctaaacgccaagttaatcactcaacgtaagtttgataatttaacgaaagctgaacgtggaggtttgagtgaacttgataaagctggttttatcaaacgccaattggttgaaactcgccaaatcactaagcatgtggcacaaattttggatagtcgcatgaatactaaatacgatgaaaatgataaacttattcgagaggttaaagtgattaccttaaaatctaaattagtttctgacttccgaaaagatttccaattctataaagtacgtgagattaacaattaccatcatgcccatgatgcgtatctaaatgccgtcgttggaactgctttgattaagaaatatccaaaacttgaatcggagtttgtctatggtgattataaagtttatgatgttcgtaaaatgattgctaagtctgagcaagaaataggcaaagcaaccgcaaaatatttcttttactctaatatcatgaacttcttcaaaacagaaattacacttgcaaatggagagattcgcaaacgccctctaatcgaaactaatggggaaactggagaaattgtctgggataaagggcgagattttgccacagtgcgcaaagtattgtccatgccccaagtcaatattgtcaagaaaacagaagtacagacaggcggattctccaaggagtcaattttaccaaaaagaaattcggacaagcttattgctcgtaaaaaagactgggatccaaaaaaatatggtggttttgatagtccaacggtagcttattcagtcctagtggttgctaaggtggaaaaagggaaatcgaagaagttaaaatccgttaaagagttactagggatcacaattatggaaagaagttcctttgaaaaaaatccgattgactttttagaagctaaaggatataaggaagttaaaaaagacttaatcattaaactacctaaatatagtctttttgagttagaaaacggtcgtaaacggatgctggctagtgccggagaattacaaaaaggaaatgagctggctctgccaagcaaatatgtgaattttttatatttagctagtcattatgaaaagttgaagggtagtccagaagataacgaacaaaaacaattgtttgtggagcagcataagcattatttagatgagattattgagcaaatcagtgaattttctaagcgtgttattttagcagatgccaatttagataaagttcttagtgcatataacaaacatagagacaaaccaatacgtgaacaagcagaaaatattattcatttatttacgttgacgaatcttggagctcccgctgcttttaaatattttgatacaacaattgatcgtaaacgatatacgtctacaaaagaagttttagatgccactcttatccatcaatccatcactggtctttatgaaacacgcattgatttgagtcagctaggaggtgactga

SEQ ID NO: 12 - protein, 1368 aa, Streptococcus pyogenes [sequence omitted]

SEQ ID NO: 13 - protein, 1378 aa, Lactobacillus fermentum
MKEYHIGLDIGTSSIGWAVTDSQFKLMRIKGKTAIGVRLFEEGKTAAERRTFRTTRRRLKRRKWRLHYLDEIFAPHLQEVDENFLRRLKQSNIHPEDPTKNQAFIGKLLFPDLLKKNERGYPTLIKMRDELPVEQRAHYPVMNIYKLREAMINEDRQFDLREVYLAVHHIVKYRGHFLNNASVDKFKVGRIDFDKSFNVLNEAYEELQNGEGSFTIEPSKVEKIGQLLLDTKMRKLDRQKAVAKLLEVKVADKEETKRNKQIATAMSKLVLGYKADFATVAMANGNEWKIDLSSETSEDEIEKFREELSDAQNDILTEITSLFSQIMLNEIVPNGMSISESMMDRYWTHERQLAEVKEYLATQPASARKEFDQVYNKYIGQAPKERGFDLEKGLKKILSKKENWKEIDELLKAGDFLPKQRTSANGVIPHQMHQQELDRIIEKQAKYYPWLATENPATGERDRHQAKYELDQLVSFRIPYYVGPLVTPEVQKATSGAKFAWAKRKEDGEITPWNLWDKIDRAESAEAFIKRMTVKDTYLLNEDVLPANSLLYQKYNVLNELNNVRVNGRRLSVGIKQDIYTELFKKKKTVKASDVASLVMAKTRGVNKPSVEGLSDPKKFNSNLATYLDLKSIVGDKVDDNRYQTDLENIIEWRSVFEDGEIFADKLTEVEWLTDEQRSALVKKRYKGWGRLSKKLLTGIVDENGQRIIDLMWNTDQNFKEIVDQPVFKEQIDQLNQKAITNDGMTLRERVESVLDDAYTSPQNKKAIWQVVRVVEDIVKAVGNAPKSISIEFARNEGNKGEITRSRRTQLQKLFEDQAHELVKDTSLTEELEKAPDLSDRYYFYFTQGGKDMYTGDPINFDEISTKYDIDHILPQSFVKDNSLDNRVLTSRKENNKKSDQVPAKLYAAKMKPYWNQLLKQGLITQRKFENLTKDVDQNIKYRSLGFVKRQLVETRQVIKLTANILGSMYQEAGTEIIETRAGLTKQLREEFDLPKVREVNDYHHAVDAYLTTFAGQYLNRRYPKLRSFFVYGEYMKFKHGSDLKLRNFNFFHELMEGDKSQGKVVDQQTGELITTRDEVAKSFDRLLNMKYMLVSKEVHDRSDQLYGATIVTAKESGKLTSPIEIKKNRLVDLYGAYTNGTSAFMTIIKFTGNKPKYKVIGIPTTSAASLKRAGKPGSESYNQELHRIIKSNPKVKKGFEIVVPHVSYGQLIVDGDCKFTLASPTVQHPATQLVLSKKSLETISSGYKILKDKPAIANERLIRVFDEVVGQMNRYFTIFDQRSNRQKVADARDKFLSLPTESKYEGAKKVQVGKTEVITNLLMGLHANATQGDLKVLGLATFGFFQSTTGLSLSEDTMIVYQSPTGLFERRICLKDI

SEQ ID NO: 14 - protein, 1368 aa, Streptococcus pyogenes [sequence omitted]

SEQ ID NO: 15 - protein, 1053 aa, Staphylococcus aureus
MGKRNYILGLDIGITSVGYGIIDYETRDVIDAGVRLFKEANVENNEGRRSKRGARRLKRRRRHRIQRVKKLLFDYNLLTDHSELSGINPYEARVKGLSQKLSEEEFSAALLHLAKRRGVHNVNEVEEDTGNELSTKEQISRNSKALEEKYVAELQLERLKKDGEVRGSINRFKTSDYVKEAKQLLKVQKAYHQLDQSFIDTYIDLLETRRTYYEGPGEGSPFGWKDIKEWYEMLMGHCTYFPEELRSVKYAYNADLYNALNDLNNLVITRDENEKLEYYEKFQIIENVFKQKKKPTLKQIAKEILVNEEDIKGYRVTSTGKPEFTNLKVYHDIKDITARKEIIENAELLDQIAKILTIYQSSEDIQEELTNLNSELTQEEIEQISNLKGYTGTHNLSLKAINLILDELWHTNDNQIAIFNRLKLVPKKVDLSQQKEIPTTLVDDFILSPVVKRSFIQSIKVINAIIKKYGLPNDIIIELAREKNSKDAQKMINEMQKRNRQTNERIEEIIRTTGKENAKYLIEKIKLHDMQEGKCLYSLEAIPLEDLLNNPFNYEVDHIIPRSVSFDNSFNNKVLVKQEENSKKGNRTPFQYLSSSDSKISYETFKKHILNLAKGKGRISKTKKEYLLEERDINRFSVQKDFINRNLVDTRYATRGLMNLLRSYFRVNNLDVKVKSINGGFTSFLRRKWKFKKERNKGYKHHAEDALIIANADFIFKEWKKLDKAKKVMENQMFEEKQAESMPEIETEQEYKEIFITPHQIKHIKDFKDYKYSHRVDKKPNRKLINDTLYSTRKDDKGNTLIVNNLNGLYDKDNDKLKKLINKSPEKLLMYHHDPQTYQKLKLIMEQYGDEKNPLYKYYEETGNYLTKYSKKDNGPVIKKIKYYGNKLNAHLDITDDYPNSRNKVVKLSLKPYRFDVYLDNGVYKFVTVKNLDVIKKENYYEVNSKCYEEAKKLKKISNQAEFIASFYKNDLIKINGELYRVIGVNNDLLNRIEVNMIDITYREYLENMNDKRPPHIIKTIASKTQSIKKYSTDILGNLYEVKSKKHPQIIKK

SEQ ID NO: 16 - protein, 1409 aa, Streptococcus thermophilus
MLFNKCIIISINLDFSNKEKCMTKPYSIGLDIGTNSVGWAVITDNYKVPSKKMKVLGNTSKKYIKKNLLGVLLFDSGITAEGRRLKRTARRRYTRRRNRILYLQEIFSTEMATLDDAFFQRLDDSFLVPDDKRDSKYPIFGNLVEEKVYHDEFPTIYHLRKYLADSTKKADLRLVYLALAHMIKYRGHFLIEGEFNSKNNDIQKNFQDFLDTYNAIFESDLSLENSKQLEEIVKDKISKLEKKDRILKLFPGEKNSGIFSEFLKLIVGNQADFRKCFNLDEKASLHFSKESYDEDLETLLGYIGDDYSDVFLKAKKLYDAILLSGFLTVTDNETEAPLSSAMIKRYNEHKEDLALLKEYIRNISLKTYNEVFKDDTKNGYAGYIDGKTNQEDFYVYLKNLLAEFEGADYFLEKIDREDFLRKQRTFDNGSIPYQIHLQEMRAILDKQAKFYPFLAKNKERIEKILTFRIPYYVGPLARGNSDFAWSIRKRNEKITPWNFEDVIDKESSAEAFINRMTSFDLYLPEEKVLPKHSLLYETFNVYNELTKVRFIAESMRDYQFLDSKQKKDIVRLYFKDKRKVTDKDIIEYLHAIYGYDGIELKGIEKQFNSSLSTYHDLLNIINDKEFLDDSSNEAIIEEIIHTLTIFEDREMIKQRLSKFENIFDKSVLKKLSRRHYTGWGKLSAKLINGIRDEKSGNTILDYLIDDGISNRNFMQLIHDDALSFKKKIQKAQIIGDEDKGNIKEVVKSLPGSPAIKKGILQSIKIVDELVKVMGGRKPESIVVEMARENQYTNQGKSNSQQRLKRLEKSLKELGSKILKENIPAKLSKIDNNALQNDRLYLYYLQNGKDMYTGDDLDIDRLSNYDIDHIIPQAFLKDNSIDNKVLVSSASNRGKSDDFPSLEVVKKRKTFWYQLLKSKLISQRKFDNLTKAERGGLLPEDKAGFIQRQLVETRQITKHVARLLDEKFNNKKDENNRAVRTVKIITLKSTLVSQFRKDFELYKVREINDFHHAHDAYLNAVIASALLKKYPKLEPEFVYGDYPKYNSFRERKSATEKVYFYSNIMNIFKKSISLADGRVIERPLIEVNEETGESVWNKESDLATVRRVLSYPQVNVVKKVEEQNHGLDRGKPKGLFNANLSSKPKPNSNENLVGAKEYLDPKKYGGYAGISNSFAVLVKGTIEKGAKKKITNVLEFQGISILDRINYRKDKLNFLLEKGYKDIELIIELPKYSLFELSDGSRRMLASILSTNNKRGEIHKGNQIFLSQKFVKLLYHAKRISNTINENHRKYVENHKKEFEELFYYILEFNENYVGAKKNGKLLNSAFQSWQNHSIDELCSSFIGPTGSERKGLFELTSRGSAADFEFLGVKIPRYRDYTPSSLLKDATLIHQSVTGLYETRIDLAKLGEG

SEQ ID NO: 17 - protein, 1402 aa, Lactobacillus crispatus
MKIKNYNLALTPSTSAVGHVEVDDDLNILEPVHHQKAIGVAKFGEGETAEARRLARSARRTTKRRANRINHYFNEIMKPEIDKVDPLMFDRIKQAGLSPLDERKEFRTVIFDRPNIASYYHNQFPTIWHLQKYLMITDEKADIRLIYWALHSLLKHRGHFFNTTPMSQFKPGKLNLKDDMLALDDYNDLEGLSFAVANSPEIEKVIKDRSMHKKEKIAELKKLIVNDVPDKDLAKRNNKIITQIVNAIMGNSFHLNFIFDMDLDKLTSKAWSFKLDDPELDTKFDAISGSMTDNQIGIFETLQKIYSAISLLDILNGSSNVVDAKNALYDKHKRDLNLYFKFLNTLPDEIAKTLKAGYTLYIGNRKKDLLAARKLLKVNVAKNFSQDDFYKLINKELKSIDKQGLQTRFSEKVGELVAQNNFLPVQRSSDNVFIPYQLNAITFNKILENQGKYYDFLVKPNPAKKDRKNAPYELSQLMQFTIPYYVGPLVTPEEQVKSGIPKTSRFAWMVRKDNGAITPWNFYDKVDIEATADKFIKRSIAKDSYLLSELVLPKHSLLYEKYEVFNELSNVSLDGKKLSGGVKQILFNEVFKKTNKVNTSRILKALAKHNIPGSKITGLSNPEEFTSSLQTYNAWKKYFPNQIDNFAYQQDLEKMIEWSTVFEDHKILAKKLDEIEWLDDDQKKFVANTRLRGWGRLSKRLLTGLKDNYGKSIMQRLETTKANFQQIVYKPEFREQIDKISQAAAKNQSLEDILANSYTSPSNRKAIRKTMSVVDEYIKLNHGKEPDKIFLMFQRSEQEKGKQTEARSKQLNRILSQLKADKSANKLFSKQLADEFSNAIKKSKYKLNDKQYFYFQQLGRDALTGEVIDYDELYKYTVLHIIPRSKLTDDSQNNKVLTKYKIVDGSVALKFGNSYSDALGMPIKAFWTELNRLKLIPKGKLLNLTTDFSTLNKYQRDGYIARQLVETQQIVKLLATIMQSRFKHTKIIEVRNSQVANIRYQFDYFRIKNLNEYYRGFDAYLAAVVGTYLYKVYPKARRLFVYGQYLKPKKTNQENQDMHLDSEKKSQGFNFLWNLLYGKQDQIFVNGTDVIAFNRKDLITKMNTVYNYKSQKISLAIDYHNGAMFKATLFPRNDRDTAKTRKLIPKKKDYDTDIYGGYTSNVDGYMLLAEIIKRDGNKQYGFYGVPSRLVSELDTLKKTRYTEYEEKLKEIIKPELGVDLKKIKKIKILKNKVPFNQVIIDKGSKFFITSTSYRWNYRQLILSAESQQTLMDLVVDPDFSNHKARKDARKNADERLIKVYEEILYQVKNYMPMFVELHRCYEKLVDAQKTFKSLKISDKAMVLNQILILLHSNATSPVLEKLGYHTRFTLGKKHNLISENAVLVTQSITGLKENHVSIKQML

SEQ ID NO: 18 - protein, 1385 aa, Pedicoccus damnosus
MTNEKYSIGLDIGTSSIGFAVVNDNNRVIRVKGKNAIGVRLFDEGKAAADRRSFRTTRRSFRTTRRRLSRRRWRLKLLREIFDAYITPVDEAFFIRLKESNLSPKDSKKQYSGDILFNDRSDKDFYEKYPTIYHLRNALMTEHRKFDVREIYLAIHHIMKFRGHFLNATPANNFKVGRLNLEEKFEELNDIYQRVFPDESIEFRTDNLEQIKEVLLDNKRSRADRQRTLVSDIYQSSEDKDIEKRNKAVATEILKASLGNKAKLNVITNVEVDKEAAKEWSITFDSESIDDDLAKIEGQMTDDGHEIIEVLRSLYSGITLSAIVPENHTLSQSMVAKYDLHKDHLKLFKKLINGMTDTKKAKNLRAAYDGYIDGVKGKVLPQEDFYKQVQVNLDDSAEANEIQTYIDQDIFMPKQRTKANGSIPHQLQQQELDQIIENQKAYYPWLAELNPNPDKKRQQLAKYKLDELVTFRVPYYVGPMITAKDQKNQSGAEFAWMIRKEPGNITPWNFDQKVDRMATANQFIKRMTTTDTYLLGEDVLPAQSLLYQKFEVLNELNKIRIDHKPISIEQKQQIFNDLFKQFKNVTIKHLQDYLVSQGQYSKRPLIEGLADEKRFNSSLSTYSDLCGIFGAKLVEENDRQEDLEKIIEWSTIFEDKKIYRAKLNDLTWLTDDQKEKLATKRYQGWGRLSRKLLVGLKNSEHRNIMDILWITNENFMQIQAEPDFAKLVTDANKGMLEKTDSQDVINDLYTSPQNKKAIRQILLVVHDIQNAMHGQAPAKIHVEFARGEERNPRRSVQRQRQVEAAYEKVSNELVSAKVRQEFKEAINNKRDFKDRLFLYFMQGGIDIYTGKQLNIDQLSSYQIDHILPQAFVKDDSLTNRVLTNENQVKADSVPIDIFGKKMLSVWGRMKDQGLISKGKYRNLTMNPENISAHTENGFINRQLVETRQVIKLAVNILADEYGDSTQIISVKADLSHQMREDFELLKNRDVNDYHHAFDAYLAAFIGNYLLKRYPKLESYFVYGDFKKFTQKETKMRRFNFIYDLKHCDQVVNKETGEILWTKDEDIKYIRHLFAYKKILVSHEVREKRGALYNQTIYKAKDDKGSGQESKKLIRIKDDKETKIYGGYSGKSLAYMTIVQITKKNKVSYRVIGIPTLALARLNKLENDSTENNGELYKIIKPQFTHYKVDKKNGEIIETTDDFKIVVSKVRFQQLIDDAGQFFMLASDTYKNNAQQLVISNNALKAINNTNITDCPRDDLERLDNLRLDSAFDEIVKKMDKYFSAYDANNFREKIRNSNLIFYQLPVEDQWENNKITELGKRTVLTRILQGLHANATTTDMSIFKIKTPFGQLRQRSGISLSENAQLIYQSPTGLFERRVQLNKIK

SEQ ID NO: 19 - protein, 1367 aa, Fusobaterium nucleatum
MKKQKFSDYYLGFDIGTNSVGWCVTDLDYNVLRFNKKDMWGSRLFEEAKTAAERRVQRNSRRRLKRRKWRLNLLEEIFSNEILKIDSNFFRRLKESSLWLEDKSSKEKFTLFNDDNYKDYDFYKQYPTIFHLRNELIKNPEKKDIRLVYLAIHSIFKSRGHFLFEGQNLKEIKNFETLYNNLIAFLEDNGINKIIDKNNIEKLEKIVCDSKKGLKDKEKEFKEIFNSDKQLVAIFKLSVGSSVSLNDLFDTDEYKKGEVEKEKISFREQIYEDDKPIYYSILGEKIELLDIAKTFYDFMVLNNILADSQYISEAKVKLYEEHKKDLKNLKYIIRKYNKGNYDKLFKDKNENNYSAYIGLNKEKSKKEVIEKSRLKIDDLIKNIKGYLPKVEEIEEKDKAIFNKILNKIELKTILPKQRISDNGTLPYQIHEAELEKILENQSKYYDFLNYEENGIITKDKLLMTFKFRIPYYVGPLNSYHKDKGGNSWIVRKEEGKILPWNFEQKVDIEKSAEEFIKRMTNKCTYLNGEDVIPKDTFLYSEYVILNELNKVQVNDEFLNEENKRKIIDELFKENKKVSEKKFKEYLLVKQIVDGTIELKGVKDSFNSNYISYIRFKDIFGEKLNLDIYKEISEKSILWKCLYGDDKKIFEKKIKNEYGDILTKDEIKKINTFKFNNWGRLSEKLLTGIEFINLETGECYSSVMDALRRTNYNLMELLSSKFTLQESINNENKEMNEASYRDLIEESYVSPSLKRAIFQTLKIYEEIRKITGRVPKKVFIEMARGGDESMKNKKIPARQEQLKKLYDSCGNDIANFSIDIKEMKNSLISYDNNSLRQKKLYLYYLQFGKCMYTGREIDLDRLLQNNDTYDIDHIYPRSKVIKDDSFDNLVLVLKNENAEKSNEYPVKKEIQEKMKSFWRFLKEKNFISDEKYKRLTGKDDFELRGFMARQLVNVRQTTKEVGKILQQIEPEIKIVYSKAEIASSFREMFDFIKVRELNDTHHAKDAYLNIVAGNVYNTKFTEKPYRYLQEIKENYDVKKIYNYDIKNAWDKENSLEIVKKNMEKNTVNITRFIKEKKGQLFDLNPIKKGETSNEIISIKPKVYNGKDDKLNEKYGYYKSLNPAYFLYVEHKEKNKRIKSFERVNLVDVNNIKDEKSLVKYLIENKKLVEPRVIKKVYKRQVILINDYPYSIVTLDSNKLMDFENLKPLFLENKYEKILKNVIKFLEDNQGKSEENYKFIYLKKKDRYEKNETLESVKDRYNLEFNEMYDKFLEKLDSKDYKNYMNNKKYQELLDVKEKFIKLNLFDKAFTLKSFLDLFNRKTMADFSKVGLTKYLGKIQKISSNVLSKNELYLLEESVTGLFVKKIKL

SEQ ID NO: 20 - protein, 1346 aa, Enterococcus cecorum
MNKYYLGLDMGSASVGWAVTDENYHLVRRKGKDLWGVRTFDVAQTAKERRITRGNRRRQDRRKQRIQILQELLGEEVLKTDPGFFHRMKESRYVVEDKRTLDGKQVELPYALFVDKDYTDKEYYKQFPTINHLIVYLMTTSDTPDIRLVYLALHYYMKNRGNFLHSGDINNVKDINDILEQLDNVLETFLDGWNLKLKSYVEDIKNIYNRDLGRGERKKAFVNTLGAKTKAEKAFCSLISGGSTNLAELFDDSSLKEIETPKIEFASSSLEDKIDGIQEALEDRFAVIEAAKRLYDWKTLTDILGDSSSLAEARVNSYQMHHEQLLELKSLVKEYLDRKVFQEVFVSLNVANNYPAYIGHTKINGKKKELEVKRTKRNDFYSYVKKQVIEPIKKKVSDEAVLTKLSEIESLIEVDKYLPLQVNSDNGVIPYQVKLNELTRIFDNLENRIPVLRENRDKIIKTFKFRIPYYVGSLNGVVKNGKCTNWMVRKEEGKIYPWNFEDKVDLEASAEQFIRRMTNKCTYLVNEDVLPKYSLLYSKYLVLSELNNLRIDGRPLDVKIKQDIYENVFKKNRKVTLKKIKKYLLKEGIITDDDELSGLADDVKSSLTAYRDFKEKLGHLDLSEAQMENIILNITLFGDDKKLLKKRLAALYPFIDDKSLNRIATLNYRDWGRLSERFLSGITSVDQETGELRTIIQCMYETQANLMQLLAEPYHFVEAIEKENPKVDLESISYRIVNDLYVSPAVKRQIWQTLLVIKDIKQVMKHDPERIFIEMAREKQESKKTKSRKQVLSEVYKKAKEYEHLFEKLNSLTEEQLRSKKIYLYFTQLGKCMYSGEPIDFENLVSANSNYDIDHIYPQSKTIDDSFNNIVLVKKSLNAYKSNHYPIDKNIRDNEKVKTLWNTLVSKGLITKEKYERLIRSTPFSDEELAGFIARQLVETRQSTKAVAEILSNWFPESEIVYSKAKNVSNFRQDFEILKVRELNDCHHAHDAYLNIVVGNAYHTKFTNSPYRFIKNKANQEYNLRKLLQKVNKIESNGVVAWVGQSENNPGTIATVKKVIRRNTVLISRMVKEVDGQLFDLTLMKKGKGQVPIKSSDERLTDISKYGGYNKATGAYFTFVKSKKRGKVVRSFEYVPLHLSKQFENNNELLKEYIEKDRGLTDVEILIPKVLINSLFRYNGSLVRITGRGDTRLLLVHEQPLYVSNSFVQQLKSVSSYKLKKSENDNAKLTKTATEKLSNIDELYDGLLRKLDLPIYSYWFSSIKEYLVESRTKYIKLSIEEKALVIFEILHLFQSDAQVPNLKILGLSTKPSRIRIQKNLKDTDKMSIIHQSPSGIFEHEIELTSL

SEQ ID NO: 21 - protein, 1312 aa, Anaerostipes hadrus
MQNGFLGITVSSEQVGWAVTNPKYELERASRKDLWGVRLFDKAETAEDRRMFRTNRRLNQRKKNRIHYLRDIFHEEVNQKDPNFFQQLDESNFCEDDRTVEFNFDTNLYKNQFPTVYHLRKYLMETKDKPDIRLVYLAFSKFMKNRGHFLYKGNLGEVMDFENSMKGFCESLEKFNIDFPTLSDEQVKEVRDILCDHKIAKTVKKKNIITITKVKSKTAKAWIGLFCGCSVPVKVLFQDIDEEIVTDPEKISFEDASYDDYIANIEKGVGIYYEAIVSAKMLFDWSILNEILGDHQLLSDAMIAEYNKHHDDLKRLQKIIKGTGSRELYQDIFINDVSGNYVCYVGHAKTMSSADQKQFYTFLKNRLKNVNGISSEDAEWIDTEIKNGTLLPKQTKRDNSVIPHQLQLREFELILDNMQEMYPFLKENREKLLKIFNFVIPYYVGPLKGVVRKGESTNWMVPKKDGVIHPWNFDEMVDKEASAECFISRMTGNCSYLFNEKVLPKNSLLYETFEVLNELNPLKINGEPISVELKQRIYEQLFLTGKKVTKKSLTKYLIKNGYDKDIELSGIDNEFHSNLKSHIDFEDYDNLSDEEVEQIILRITVFEDKQLLKDYLNREFVKLSEDERKQICSLSYKGWGNLSEMLLNGITVTDSNGVEVSVMDMLWNTNLNLMQILSKKYGYKAEIEHYNKEHEKTIYNREDLMDYLNIPPAQRRKVNQLITIVKSLKKTYGVPNKIFFKISREHQDDPKRTSSRKEQLKYLYKSLKSEDEKHLMKELDELNDHELSNDKVYLYFLQKGRCIYSGKKLNLSRLRKSNYQNDIDYIYPLSAVNDRSMNNKVLTGIQENRADKYTYFPVDSEIQKKMKGFWMELVLQGFMTKEKYFRLSRENDFSKSELVSFIEREISDNQQSGRMIASVLQYYFPESKIVFVKEKLISSFKRDFHLISSYGHNHLQAAKDAYITIVVGNVYHTKFTMDPAIYFKNHKRKDYDLNRLFLENISRDGQIAWESGPYGSIQTVRKEYAQNHIAVTKRVVEVKGGLFKQMPLKKGHGEYPLKTNDPRFGNIAQYGGYTNVTGSYFVLVESMEKGKKRISLEYVPVYLHERLEDDPGHKLLKEYLVDHRKLNHPKILLAKVRKNSLLKIDGFYYRLNGRSGNALILTNAVELIMDDWQTKTANKISGYMKRRAIDKKARVYQNEFHIQELEQLYDFYLDKLKNGVYKNRKNNQAELIHNEKEQFMELKTEDQCVLLTEIKKLFVCSPMQADLTLIGGSKHTGMIAMSSNVTKADFAVIAEDPLGLRNKVIYSHKGEK

SEQ ID NO: 22 - protein, 1344 aa, Kandleria vitulina
MSQNNNKIYNIGLDIGDASVGWAVVDEHYNLLKRHGKHMWGSRLFTQANTAVERRSSRSTRRRYNKRRERIRLLREIMEDMVLDVDPTFFIRLANVSFLDQEDKKDYLKENYHSNYNLFIDKDFNDKTYYDKYPTIYHLRKHLCESKEKEDPRLIYLALHHIVKYRGNFLYEGQKFSMDVSNIEDKMIDVLRQFNEINLFEYVEDRKKIDEVLNVLKEPLSKKHKAEKAFALFDTTKDNKAAYKELCAALAGNKFNVTKMLKEAELHDEDEKDISFKFSDATFDDAFVEKQPLLGDCVEFIDLLHDIYSWVELQNILGSAHTSEPSISAAMIQRYEDHKNDLKLLKDVIRKYLPKKYFEVFRDEKSKKNNYCNYINHPSKTPVDEFYKYIKKLIEKIDDPDVKTILNKIELESFMLKQNSRTNGAVPYQMQLDELNKILENQSVYYSDLKDNEDKIRSILTFRIPYYFGPLNITKDRQFDWIIKKEGKENERILPWNANEIVDVDKTADEFIKRMRNFCTYFPDEPVMAKNSLTVSKYEVLNEINKLRINDHLIKRDMKDKMLHTLFMDHKSISANAMKKWLVKNQYFSNTDDIKIEGFQKENACSTSLTPWIDFTKIFGKINESNYDFIEKIIYDVTVFEDKKILRRRLKKEYDLDEEKIKKILKLKYSGWSRLSKKLLSGIKTKYKDSTRTPETVLEVMERTNMNLMQVINDEKLGFKKTIDDANSTSVSGKFSYAEVQELAGSPAIKRGIWQALLIVDEIKKIMKHEPAHVYIEFARNEDEKERKDSFVNQMLKLYKDYDFEDETEKEANKHLKGEDAKSKIRSERLKLYYTQMGKCMYTGKSLDIDRLDTYQVDHIVPQSLLKDDSIDNKVLVLSSENQRKLDDLVIPSSIRNKMYGFWEKLFNNKIISPKKFYSLIKTEFNEKDQERFINRQIVETRQITKHVAQIIDNHYENTKVVTVRADLSHQFRERYHIYKNRDINDFHHAHDAYIATILGTYIGHRFESLDAKYIYGEYKRIFRNQKNKGKEMKKNNDGFILNSMRNIYADKDTGEIVWDPNYIDRIKKCFYYKDCFVTKKLEENNGTFFNVTVLPNDTNSDKDNTLATVPVNKYRSNVNKYGGFSGVNSFIVAIKGKKKKGKKVIEVNKLTGIPLMYKNADEEIKINYLKQAEDLEEVQIGKEILKNQLIEKDGGLYYIVAPTEIINAKQLILNESQTKLVCEIYKAMKYKNYDNLDSEKIIDLYRLLINKMELYYPEYRKQLVKKFEDRYEQLKVISIEEKCNIIKQILATLHCNSSIGKIMYSDFKISTTIGRLNGRTISLDDISFIAESPTGMYSKKYKL

SEQ ID NO: 23 - protein, 1288 aa, Enterococcus faecalis
MRLFEEGHTAEDRRLKRTARRRISRRRNRLRYLQAFFEEAMTDLDENFFARLQESFLVPEDKKWHRHPIFAKLEDEVAYHETYPTIYHLRKKLADSSEQADLRLIYLALAHIVKYRGHFLIEGKLSTENTSVKDQFQQFMVIYNQTFVNGESRLVSAPLPESVLIEEELTEKASRTKKSEKVLQQFPQEKANGLFGQFLKLMVGNKADFKKVFGLEEEAKITYASESYEEDLEGILAKVGDEYSDVFLAAKNVYDAVELSTILADSDKKSHAKLSSSMIVRFTEHQEDLKKFKRFIRENCPDEYDNLFKNEQKDGYAGYIAHAGKVSQLKFYQYVKKIIQDIAGAEYFLEKIAQENFLRKQRTFDNGVIPHQIHLAELQAIIHRQAAYYPFLKENQEKIEQLVTFRIPYYVGPLSKGDASTFAWLKRQSEEPIRPWNLQETVDLDQSATAFIERMTNFDTYLPSEKVLPKHSLLYEKFMVFNELTKISYTDDRGIKANFSGKEKEKIFDYLFKTRRKVKKKDIIQFYRNEYNTEIVTLSGLEEDQFNASFSTYQDLLKCGLTRAELDHPDNAEKLEDIIKILTIFEDRQRIRTQLSTFKGQFSAEVLKKLERKHYTGWGRLSKKLINGIYDKESGKTILDYLVKDDGVSKHYNRNFMQLINDSQLSFKNAIQKAQSSEHEETLSETVNELAGSPAIKKGIYQSLKIVDELVAIMGYAPKRIVVEMARENQTTSTGKRRSIQRLKIVEKAMAEIGSNLLKEQPTTNEQLRDTRLFLYYMQNGKDMYTGDELSLHRLSHYDIDHIIPQSFMKDDSLDNLVLVGSTENRGKSDDVPSKEVVKDMKAYWEKLYAAGLISQRKFQRLTKGEQGGLTLEDKAHFIQRQLVETRQITKNVAGILDQRYNAKSKEKKVQIITLKASLTSQFRSIFGLYKVREVNDYHHGQDAYLNCVVATTLLKVYPNLAPEFVYGEYPKFQTFKENKATAKAIIYTNLLRFFTEDEPRFTKDGEILWSNSYLKTIKKELNYHQMNIVKKVEVQKGGFSKESIKPKGPSNKLIPVKNGLDPQKYGGFDSPVVAYTVLFTHEKGKKPLIKQEILGITIMEKTRFEQNPILFLEEKGFLRPRVLMKLPKYTLYEFPEGRRRLLASAKEAQKGNQMVLPEHLLTLLYHAKQCLLPNQSESLAYVEQHQPEFQEILERVVDFAEVHTLAKSKVQQIVKLFEANQTADVKEIAASFIQLMQFNAMGAPSTFKFFQKDIERARYTSIKEIFDATIIYQSPTGLYETRRKVVD

SEQ ID NO: 24 - protein, 1052 aa, Staphylococcus aureus
KRNYILGLDIGITSVGYGIIDYETRDVIDAGVRLFKEANVENNEGRRSKRGARRLKRRRRHRIQRVKKLLFDYNLLTDHSELSGINPYEARVKGLSQKLSEEEFSAALLHLAKRRGVHNVNEVEEDTGNELSTKEQISRNSKALEEKYVAELQLERLKKDGEVRGSINRFKTSDYVKEAKQLLKVQKAYHQLDQSFIDTYIDLLETRRTYYEGPGEGSPFGWKDIKEWYEMLMGHCTYFPEELRSVKYAYNADLYNALNDLNNLVITRDENEKLEYYEKFQIIENVFKQKKKPTLKQIAKEILVNEEDIKGYRVTSTGKPEFTNLKVYHDIKDITARKEIIENAELLDQIAKILTIYQSSEDIQEELTNLNSELTQEEIEQISNLKGYTGTHNLSLKAINLILDELWHTNDNQIAIFNRLKLVPKKVDLSQQKEIPTTLVDDFILSPVVKRSFIQSIKVINAIIKKYGLPNDIIIELAREKNSKDAQKMINEMQKRNRQTNERIEEIIRTTGKENAKYLIEKIKLHDMQEGKCLYSLEAIPLEDLLNNPFNYEVDHIIPRSVSFDNSFNNKVLVKQEENSKKGNRTPFQYLSSSDSKISYETFKKHILNLAKGKGRISKTKKEYLLEERDINRFSVQKDFINRNLVDTRYATRGLMNLLRSYFRVNNLDVKVKSINGGFTSFLRRKWKFKKERNKGYKHHAEDALIIANADFIFKEWKKLDKAKKVMENQMFEEKQAESMPEIETEQEYKEIFITPHQIKHIKDFKDYKYSHRVDKKPNRELINDTLYSTRKDDKGNTLIVNNLNGLYDKDNDKLKKLINKSPEKLLMYHHDPQTYQKLKLIMEQYGDEKNPLYKYYEETGNYLTKYSKKDNGPVIKKIKYYGNKLNAHLDITDDYPNSRNKVVKLSLKPYRFDVYLDNGVYKFVTVKNLDVIKKENYYEVNSKCYEEAKKLKKISNQAEFIASFYNNDLIKINGELYRVIGVNNDLLNRIEVNMIDITYREYLENMNDKRPPRIIKTIASKTQSIKKYSTDILGNLYEVKSKKHPQIIKKG

SEQ ID NO: 25 - protein, 1082 aa, Geobacillus thermodenitrificans
MKYKIGLDIGITSIGWAVINLDIPRIEDLGVRIFDRAENPKTGESLALPRRLARSARRRLRRRKHRLERIRRLFVREGILTKEELNKLFEKKHEIDVWQLRVEALDRKLNNDELARILLHLAKRRGFRSNRKSERTNKENSTMLKHIEENQSILSSYRTVAEMVVKDPKFSLHKRNKEDNYTNTVARDDLEREIKLIFAKQREYGNIVCTEAFEHEYISIWASQRPFASKDDIEKKVGFCTFEPKEKRAPKATYTFQSFTVWEHINKLRLVSPGGIRALTDDERRLIYKQAFHKNKITFHDVRTLLNLPDDTRFKGLLYDRNTTLKENEKVRFLELGAYHKIRKAIDSVYGKGAAKSFRPIDFDTFGYALTMFKDDTDIRSYLRNEYEQNGKRMENLADKVYDEELIEELLNLSFSKFGHLSLKALRNILPYMEQGEVYSTACERAGYTFTGPKKKQKTVLLPNIPPIANPVVMRALTQARKVVNAIIKKYGSPVSIHIELARELSQSFDERRKMQKEQEGNRKKNETAIRQLVEYGLTLNPTGLDIVKFKLWSEQNGKCAYSLQPIEIERLLEPGYTEVDHVIPYSRSLDDSYTNKVLVLTKENREKGNRTPAEYLGLGSERWQQFETFVLTNKQFSKKKRDRLLRLHYDENEENEFKNRNLNDTRYISRFLANFIREHLKFADSDDKQKVYTVNGRITAHLRSRWNFNKNREESNLHHAVDAAIVACTTPSDIARVTAFYQRREQNKELSKKTDPQFPQPWPHFADELQARLSKNPKESIKALNLGNYDNEKLESLQPVFVSRMPKRSITGAAHQETLRRYIGIDERSGKIQTVVKKKLSEIQLDKTGHFPMYGKESDPRTYEAIRQRLLEHNNDPKKAFQEPLYKPKKNGELGPIIRTIKIIDTTNQVIPLNDGKTVAYNSNIVRVDVFEKDGKYYCVPIYTIDMMKGILPNKAIEPNKPYSEWKEMTEDYTFRFSLYPNDLIRIEFPREKTIKTAVGEEIKIKDLFAYYQTIDSSNGGLSLVSHDNNFSLRSIGSRTLKRFEKYQVDVLGNIYKVRGEKRVGVASSSHSKAGETIRPL

SEQ ID NO: 26 - protein, 1375 aa, Streptococcus canis
MEKKYSIGLDIGTNSVGWAVITDDYKVPSKKFKVLGNTNRKSIKKNLMGALLFDSGETAEATRLKRTARRRYTRRKNRIRYLQEIFANEMAKLDDSFFQRLEESFLVEEDKKNERHPIFGNLADEVAYHRNYPTIYHLRKKLADSPEKADLRLIYLALAHIIKFRGHFLIEGKLNAENSDVAKLFYQLIQTYNQLFEESPLDEIEVDAKGILSARLSKSKRLEKLIAVFPNEKKNGLFGNIIALALGLTPNFKSNFDLTEDAKLQLSKDTYDDDLDELLGQIGDQYADLFSAAKNLSDAILLSDILRSNSEVTKAPLSASMVKRYDEHHQDLALLKTLVRQQFPEKYAEIFKDDTKNGYAGYVGIGIKHRKRTTKLATQEEFYKFIKPILEKMDGAEELLAKLNRDDLLRKQRTFDNGSIPHQIHLKELHAILRRQEEFYPFLKENREKIEKILTFRIPYYVGPLARGNSRFAWLTRKSEEAITPWNFEEVVDKGASAQSFIERMTNFDEQLPNKKVLPKHSLLYEYFTVYNELTKVKYVTERMRKPEFLSGEQKKAIVDLLFKTNRKVTVKQLKEDYFKKIECFDSVEIIGVEDRFNASLGTYHDLLKIIKDKDFLDNEENEDILEDIVLTLTLFEDREMIEERLKTYAHLFDDKVMKQLKRRHYTGWGRLSRKMINGIRDKQSGKTILDFLKSDGFSNRNFMQLIHDDSLTFKEEIEKAQVSGQGDSLHEQIADLAGSPAIKKGILQTVKIVDELVKVMGHKPENIVIEMARENQTTTKGLQQSRERKKRIEEGIKELESQILKENPVENTQLQNEKLYLYYLQNGRDMYVDQELDINRLSDYDVDHIVPQSFIKDDSIDNKVLTRSVENRGKSDNVPSEEVVKKMKNYWRQLLNAKLITQRKFDNLTKAERGGLSEADKAGFIKRQLVETRQITKHVARILDSRMNTKRDKNDKPIREVKVITLKSKLVSDFRKDFQLYKVRDINNYHHAHDAYLNAVVGTALIKKYPKLESEFVYGDYKVYDVRKMIAKSEQEIGKATAKRFFYSNIMNFFKTEVKLANGEIRKRPLIETNGETGEVVWNKEKDFATVRKVLAMPQVNIVKKTEVQTGGFSKESILSKRESAKLIPRKKGWDTRKYGGFGSPTVAYSILVVAKVEKGKAKKLKSVKVLVGITIMEKGSYEKDPIGFLEAKGYKDIKKELIFKLPKYSLFELENGRRRMLASATELQKANELVLPQHLVRLLYYTQNISATTGSNNLGYIEQHREEFKEIFEKIIDFSEKYILKNKVNSNLKSSFDEQFAVSDSILLSNSFVSLLKYTSFGASGGFTFLDLDVKQGRLRYQTVTEVLDATLIYQSITGLYETRTDLSQLGGD

SEQ ID NO: 27 - protein, 1368 aa, Streptococcus pyogenes
  misc_feature (10)..(10): Xaa can be any naturally occurring amino acid
  misc_feature (840)..(840): Xaa can be any naturally occurring amino acid
MDKKYSIGLXIGTNSVGWAVITDEYKVPSKKFKVLGNTDRHSIKKNLIGALLFDSGETAEATRLKRTARRRYTRRKNRICYLQEIFSNEMAKVDDSFFHRLEESFLVEEDKKHERHPIFGNIVDEVAYHEKYPTIYHLRKKLVDSTDKADLRLIYLALAHMIKFRGHFLIEGDLNPDNSDVDKLFIQLVQTYNQLFEENPINASGVDAKAILSARLSKSRRLENLIAQLPGEKKNGLFGNLIALSLGLTPNFKSNFDLAEDAKLQLSKDTYDDDLDNLLAQIGDQYADLFLAAKNLSDAILLSDILRVNTEITKAPLSASMIKRYDEHHQDLTLLKALVRQQLPEKYKEIFFDQSKNGYAGYIDGGASQEEFYKFIKPILEKMDGTEELLVKLNREDLLRKQRTFDNGSIPHQIHLGELHAILRRQEDFYPFLKDNREKIEKILTFRIPYYVGPLARGNSRFAWMTRKSEETITPWNFEEVVDKGASAQSFIERMTNFDKNLPNEKVLPKHSLLYEYFTVYNELTKVKYVTEGMRKPAFLSGEQKKAIVDLLFKTNRKVTVKQLKEDYFKKIECFDSVEISGVEDRFNASLGTYHDLLKIIKDKDFLDNEENEDILEDIVLTLTLFEDREMIEERLKTYAHLFDDKVMKQLKRRRYTGWGRLSRKLINGIRDKQSGKTILDFLKSDGFANRNFMQLIHDDSLTFKEDIQKAQVSGQGDSLHEHIANLAGSPAIKKGILQTVKVVDELVKVMGRHKPENIVIEMARENQTTQKGQKNSRERMKRIEEGIKELGSQILKEHPVENTQLQNEKLYLYYLQNGRDMYVDQELDINRLSDYDVDXIVPQSFLKDDSIDNKVLTRSDKNRGKSDNVPSEEVVKKMKNYWRQLLNAKLITQRKFDNLTKAERGGLSELDKAGFIKRQLVETRQITKHVAQILDSRMNTKYDENDKLIREVKVITLKSKLVSDFRKDFQFYKVREINNYHHAHDAYLNAVVGTALIKKYPKLESEFVYGDYKVYDVRKMIAKSEQEIGKATAKYFFYSNIMNFFKTEITLANGEIRKRPLIETNGETGEIVWDKGRDFATVRKVLSMPQVNIVKKTEVQTGGFSKESILPKRNSDKLIARKKDWDPKKYGGFDSPTVAYSVLVVAKVEKGKSKKLKSVKELLGITIMERSSFEKNPIDFLEAKGYKEVKKDLIIKLPKYSLFELENGRKRMLASAGELQKGNELALPSKYVNFLYLASHYEKLKGSPEDNEQKQLFVEQHKHYLDEIIEQISEFSKRVILADANLDKVLSAYNKHRDKPIREQAENIIHLFTLTNLGAPAAFKYFDTTIDRKRYTSTKEVLDATLIHQSITGLYETRIDLSQLGGD

SEQ ID NO: 28 - protein, 1368 aa, Streptococcus pyogenes
MDKKYSIGLAIGTNSVGWAVITDEYKVPSKKFKVLGNTDRHSIKKNLIGALLFDSGETAEATRLKRTARRRYTRRKNRICYLQEIFSNEMAKVDDSFFHRLEESFLVEEDKKHERHPIFGNIVDEVAYHEKYPTIYHLRKKLVDSTDKADLRLIYLALAHMIKFRGHFLIEGDLNPDNSDVDKLFIQLVQTYNQLFEENPINASGVDAKAILSARLSKSRRLENLIAQLPGEKKNGLFGNLIALSLGLTPNFKSNFDLAEDAKLQLSKDTYDDDLDNLLAQIGDQYADLFLAAKNLSDAILLSDILRVNTEITKAPLSASMIKRYDEHHQDLTLLKALVRQQLPEKYKEIFFDQSKNGYAGYIDGGASQEEFYKFIKPILEKMDGTEELLVKLNREDLLRKQRTFDNGSIPHQIHLGELHAILRRQEDFYPFLKDNREKIEKILTFRIPYYVGPLARGNSRFAWMTRKSEETITPWNFEEVVDKGASAQSFIERMTNFDKNLPNEKVLPKHSLLYEYFTVYNELTKVKYVTEGMRKPAFLSGEQKKAIVDLLFKTNRKVTVKQLKEDYFKKIECFDSVEISGVEDRFNASLGTYHDLLKIIKDKDFLDNEENEDILEDIVLTLTLFEDREMIEERLKTYAHLFDDKVMKQLKRRRYTGWGRLSRKLINGIRDKQSGKTILDFLKSDGFANRNFMQLIHDDSLTFKEDIQKAQVSGQGDSLHEHIANLAGSPAIKKGILQTVKVVDELVKVMGRHKPENIVIEMARENQTTQKGQKNSRERMKRIEEGIKELGSQILKEHPVENTQLQNEKLYLYYLQNGRDMYVDQELDINRLSDYDVDAIVPQSFLKDDSIDNKVLTRSDKNRGKSDNVPSEEVVKKMKNYWRQLLNAKLITQRKFDNLTKAERGGLSELDKAGFIKRQLVETRQITKHVAQILDSRMNTKYDENDKLIREVKVITLKSKLVSDFRKDFQFYKVREINNYHHAHDAYLNAVVGTALIKKYPKLESEFVYGDYKVYDVRKMIAKSEQEIGKATAKYFFYSNIMNFFKTEITLANGEIRKRPLIETNGETGEIVWDKGRDFATVRKVLSMPQVNIVKKTEVQTGGFSKESILPKRNSDKLIARKKDWDPKKYGGFDSPTVAYSVLVVAKVEKGKSKKLKSVKELLGITIMERSSFEKNPIDFLEAKGYKEVKKDLIIKLPKYSLFELENGRKRMLASAGELQKGNELALPSKYVNFLYLASHYEKLKGSPEDNEQKQLFVEQHKHYLDEIIEQISEFSKRVILADANLDKVLSAYNKHRDKPIREQAENIIHLFTLTNLGAPAAFKYFDTTIDRKRYTSTKEVLDATLIHQSITGLYETRIDLSQLGGD

SEQ ID NO: 29 - protein, 1368 aa, Streptococcus pyogenes
  misc_feature (10)..(10): Xaa can be any naturally occurring amino acid
MDKKYSIGLXIGTNSVGWAVITDEYKVPSKKFKVLGNTDRHSIKKNLIGALLFDSGETAEATRLKRTARRRYTRRKNRICYLQEIFSNEMAKVDDSFFHRLEESFLVEEDKKHERHPIFGNIVDEVAYHEKYPTIYHLRKKLVDSTDKADLRLIYLALAHMIKFRGHFLIEGDLNPDNSDVDKLFIQLVQTYNQLFEENPINASGVDAKAILSARLSKSRRLENLIAQLPGEKKNGLFGNLIALSLGLTPNFKSNFDLAEDAKLQLSKDTYDDDLDNLLAQIGDQYADLFLAAKNLSDAILLSDILRVNTEITKAPLSASMIKRYDEHHQDLTLLKALVRQQLPEKYKEIFFDQSKNGYAGYIDGGASQEEFYKFIKPILEKMDGTEELLVKLNREDLLRKQRTFDNGSIPHQIHLGELHAILRRQEDFYPFLKDNREKIEKILTFRIPYYVGPLARGNSRFAWMTRKSEETITPWNFEEVVDKGASAQSFIERMTNFDKNLPNEKVLPKHSLLYEYFTVYNELTKVKYVTEGMRKPAFLSGEQKKAIVDLLFKTNRKVTVKQLKEDYFKKIECFDSVEISGVEDRFNASLGTYHDLLKIIKDKDFLDNEENEDILEDIVLTLTLFEDREMIEERLKTYAHLFDDKVMKQLKRRRYTGWGRLSRKLINGIRDKQSGKTILDFLKSDGFANRNFMQLIHDDSLTFKEDIQKAQVSGQGDSLHEHIANLAGSPAIKKGILQTVKVVDELVKVMGRHKPENIVIEMARENQTTQKGQKNSRERMKRIEEGIKELGSQILKEHPVENTQLQNEKLYLYYLQNGRDMYVDQELDINRLSDYDVDHIVPQSFLKDDSIDNKVLTRSDKNRGKSDNVPSEEVVKKMKNYWRQLLNAKLITQRKFDNLTKAERGGLSELDKAGFIKRQLVETRQITKHVAQILDSRMNTKYDENDKLIREVKVITLKSKLVSDFRKDFQFYKVREINNYHHAHDAYLNAVVGTALIKKYPKLESEFVYGDYKVYDVRKMIAKSEQEIGKATAKYFFYSNIMNFFKTEITLANGEIRKRPLIETNGETGEIVWDKGRDFATVRKVLSMPQVNIVKKTEVQTGGFSKESILPKRNSDKLIARKKDWDPKKYGGFDSPTVAYSVLVVAKVEKGKSKKLKSVKELLGITIMERSSFEKNPIDFLEAKGYKEVKKDLIIKLPKYSLFELENGRKRMLASAGELQKGNELALPSKYVNFLYLASHYEKLKGSPEDNEQKQLFVEQHKHYLDEIIEQISEFSKRVILADANLDKVLSAYNKHRDKPIREQAENIIHLFTLTNLGAPAAFKYFDTTIDRKRYTSTKEVLDATLIHQSITGLYETRIDLSQLGGD

SEQ ID NO: 30 - protein, 1368 aa, Streptococcus pyogenes
  misc_feature (762)..(762): Xaa can be any naturally occurring amino acid
MDKKYSIGLDIGTNSVGWAVITDEYKVPSKKFKVLGNTDRHSIKKNLIGALLFDSGETAEATRLKRTARRRYTRRKNRICYLQEIFSNEMAKVDDSFFHRLEESFLVEEDKKHERHPIFGNIVDEVAYHEKYPTIYHLRKKLVDSTDKADLRLIYLALAHMIKFRGHFLIEGDLNPDNSDVDKLFIQLVQTYNQLFEENPINASGVDAKAILSARLSKSRRLENLIAQLPGEKKNGLFGNLIALSLGLTPNFKSNFDLAEDAKLQLSKDTYDDDLDNLLAQIGDQYADLFLAAKNLSDAILLSDILRVNTEITKAPLSASMIKRYDEHHQDLTLLKALVRQQLPEKYKEIFFDQSKNGYAGYIDGGASQEEFYKFIKPILEKMDGTEELLVKLNREDLLRKQRTFDNGSIPHQIHLGELHAILRRQEDFYPFLKDNREKIEKILTFRIPYYVGPLARGNSRFAWMTRKSEETITPWNFEEVVDKGASAQSFIERMTNFDKNLPNEKVLPKHSLLYEYFTVYNELTKVKYVTEGMRKPAFLSGEQKKAIVDLLFKTNRKVTVKQLKEDYFKKIECFDSVEISGVEDRFNASLGTYHDLLKIIKDKDFLDNEENEDILEDIVLTLTLFEDREMIEERLKTYAHLFDDKVMKQLKRRRYTGWGRLSRKLINGIRDKQSGKTILDFLKSDGFANRNFMQLIHDDSLTFKEDIQKAQVSGQGDSLHEHIANLAGSPAIKKGILQTVKVVDELVKVMGRHKPENIVIXMARENQTTQKGQKNSRERMKRIEEGIKELGSQILKEHPVENTQLQNEKLYLYYLQNGRDMYVDQELDINRLSDYDVDHIVPQSFLKDDSIDNKVLTRSDKNRGKSDNVPSEEVVKKMKNYWRQLLNAKLITQRKFDNLTKAERGGLSELDKAGFIKRQLVETRQITKHVAQILDSRMNTKYDENDKLIREVKVITLKSKLVSDFRKDFQFYKVREINNYHHAHDAYLNAVVGTALIKKYPKLESEFVYGDYKVYDVRKMIAKSEQEIGKATAKYFFYSNIMNFFKTEITLANGEIRKRPLIETNGETGEIVWDKGRDFATVRKVLSMPQVNIVKKTEVQTGGFSKESILPKRNSDKLIARKKDWDPKKYGGFDSPTVAYSVLVVAKVEKGKSKKLKSVKELLGITIMERSSFEKNPIDFLEAKGYKEVKKDLIIKLPKYSLFELENGRKRMLASAGELQKGNELALPSKYVNFLYLASHYEKLKGSPEDNEQKQLFVEQHKHYLDEIIEQISEFSKRVILADANLDKVLSAYNKHRDKPIREQAENIIHLFTLTNLGAPAAFKYFDTTIDRKRYTSTKEVLDATLIHQSITGLYETRIDLSQLGGD

SEQ ID NO: 31 - protein, 1368 aa, Streptococcus pyogenes
  misc_feature (983)..(983): Xaa can be any naturally occurring amino acid
MDKKYSIGLDIGTNSVGWAVITDEYKVPSKKFKVLGNTDRHSIKKNLIGALLFDSGETAEATRLKRTARRRYTRRKNRICYLQEIFSNEMAKVDDSFFHRLEESFLVEEDKKHERHPIFGNIVDEVAYHEKYPTIYHLRKKLVDSTDKADLRLIYLALAHMIKFRGHFLIEGDLNPDNSDVDKLFIQLVQTYNQLFEENPINASGVDAKAILSARLSKSRRLENLIAQLPGEKKNGLFGNLIALSLGLTPNFKSNFDLAEDAKLQLSKDTYDDDLDNLLAQIGDQYADLFLAAKNLSDAILLSDILRVNTEITKAPLSASMIKRYDEHHQDLTLLKALVRQQLPEKYKEIFFDQSKNGYAGYIDGGASQEEFYKFIKPILEKMDGTEELLVKLNREDLLRKQRTFDNGSIPHQIHLGELHAILRRQEDFYPFLKDNREKIEKILTFRIPYYVGPLARGNSRFAWMTRKSEETITPWNFEEVVDKGASAQSFIERMTNFDKNLPNEKVLPKHSLLYEYFTVYNELTKVKYVTEGMRKPAFLSGEQKKAIVDLLFKTNRKVTVKQLKEDYFKKIECFDSVEISGVEDRFNASLGTYHDLLKIIKDKDFLDNEENEDILEDIVLTLTLFEDREMIEERLKTYAHLFDDKVMKQLKRRRYTGWGRLSRKLINGIRDKQSGKTILDFLKSDGFANRNFMQLIHDDSLTFKEDIQKAQVSGQGDSLHEHIANLAGSPAIKKGILQTVKVVDELVKVMGRHKPENIVIEMARENQTTQKGQKNSRERMKRIEEGIKELGSQILKEHPVENTQLQNEKLYLYYLQNGRDMYVDQELDINRLSDYDVDHIVPQSFLKDDSIDNKVLTRSDKNRGKSDNVPSEEVVKKMKNYWRQLLNAKLITQRKFDNLTKAERGGLSELDKAGFIKRQLVETRQITKHVAQILDSRMNTKYDENDKLIREVKVITLKSKLVSDFRKDFQFYKVREINNYHXAHDAYLNAVVGTALIKKYPKLESEFVYGDYKVYDVRKMIAKSEQEIGKATAKYFFYSNIMNFFKTEITLANGEIRKRPLIETNGETGEIVWDKGRDFATVRKVLSMPQVNIVKKTEVQTGGFSKESILPKRNSDKLIARKKDWDPKKYGGFDSPTVAYSVLVVAKVEKGKSKKLKSVKELLGITIMERSSFEKNPIDFLEAKGYKEVKKDLIIKLPKYSLFELENGRKRMLASAGELQKGNELALPSKYVNFLYLASHYEKLKGSPEDNEQKQLFVEQHKHYLDEIIEQISEFSKRVILADANLDKVLSAYNKHRDKPIREQAENIIHLFTLTNLGAPAAFKYFDTTIDRKRYTSTKEVLDATLIHQSITGLYETRIDLSQLGGD

SEQ ID NO: 32 - protein, 1368 aa, Streptococcus pyogenes
  misc_feature (986)..(986): Xaa can be any naturally occurring amino acid
MDKKYSIGLDIGTNSVGWAVITDEYKVPSKKFKVLGNTDRHSIKKNLIGALLFDSGETAEATRLKRTARRRYTRRKNRICYLQEIFSNEMAKVDDSFFHRLEESFLVEEDKKHERHPIFGNIVDEVAYHEKYPTIYHLRKKLVDSTDKADLRLIYLALAHMIKFRGHFLIEGDLNPDNSDVDKLFIQLVQTYNQLFEENPINASGVDAKAILSARLSKSRRLENLIAQLPGEKKNGLFGNLIALSLGLTPNFKSNFDLAEDAKLQLSKDTYDDDLDNLLAQIGDQYADLFLAAKNLSDAILLSDILRVNTEITKAPLSASMIKRYDEHHQDLTLLKALVRQQLPEKYKEIFFDQSKNGYAGYIDGGASQEEFYKFIKPILEKMDGTEELLVKLNREDLLRKQRTFDNGSIPHQIHLGELHAILRRQEDFYPFLKDNREKIEKILTFRIPYYVGPLARGNSRFAWMTRKSEETITPWNFEEVVDKGASAQSFIERMTNFDKNLPNEKVLPKHSLLYEYFTVYNELTKVKYVTEGMRKPAFLSGEQKKAIVDLLFKTNRKVTVKQLKEDYFKKIECFDSVEISGVEDRFNASLGTYHDLLKIIKDKDFLDNEENEDILEDIVLTLTLFEDREMIEERLKTYAHLFDDKVMKQLKRRRYTGWGRLSRKLINGIRDKQSGKTILDFLKSDGFANRNFMQLIHDDSLTFKEDIQKAQVSGQGDSLHEHIANLAGSPAIKKGILQTVKVVDELVKVMGRHKPENIVIEMARENQTTQKGQKNSRERMKRIEEGIKELGSQILKEHPVENTQLQNEKLYLYYLQNGRDMYVDQELDINRLSDYDVDHIVPQSFLKDDSIDNKVLTRSDKNRGKSDNVPSEEVVKKMKNYWRQLLNAKLITQRKFDNLTKAERGGLSELDKAGFIKRQLVETRQITKHVAQILDSRMNTKYDENDKLIREVKVITLKSKLVSDFRKDFQFYKVREINNYHHAHXAYLNAVVGTALIKKYPKLESEFVYGDYKVYDVRKMIAKSEQEIGKATAKYFFYSNIMNFFKTEITLANGEIRKRPLIETNGETGEIVWDKGRDFATVRKVLSMPQVNIVKKTEVQTGGFSKESILPKRNSDKLIARKKDWDPKKYGGFDSPTVAYSVLVVAKVEKGKSKKLKSVKELLGITIMERSSFEKNPIDFLEAKGYKEVKKDLIIKLPKYSLFELENGRKRMLASAGELQKGNELALPSKYVNFLYLASHYEKLKGSPEDNEQKQLFVEQHKHYLDEIIEQISEFSKRVILADANLDKVLSAYNKHRDKPIREQAENIIHLFTLTNLGAPAAFKYFDTTIDRKRYTSTKEVLDATLIHQSITGLYETRIDLSQLGGD

SEQ ID NO: 33 - protein, 1368 aa, Streptococcus pyogenes
MDKKYSIGLAIGTNSVGWAVITDEYKVPSKKFKVLGNTDRHSIKKNLIGALLFDSGETAEATRLKRTARRRYTRRKNRICYLQEIFSNEMAKVDDSFFHRLEESFLVEEDKKHERHPIFGNIVDEVAYHEKYPTIYHLRKKLVDSTDKADLRLIYLALAHMIKFRGHFLIEGDLNPDNSDVDKLFIQLVQTYNQLFEENPINASGVDAKAILSARLSKSRRLENLIAQLPGEKKNGLFGNLIALSLGLTPNFKSNFDLAEDAKLQLSKDTYDDDLDNLLAQIGDQYADLFLAAKNLSDAILLSDILRVNTEITKAPLSASMIKRYDEHHQDLTLLKALVRQQLPEKYKEIFFDQSKNGYAGYIDGGASQEEFYKFIKPILEKMDGTEELLVKLNREDLLRKQRTFDNGSIPHQIHLGELHAILRRQEDFYPFLKDNREKIEKILTFRIPYYVGPLARGNSRFAWMTRKSEETITPWNFEEVVDKGASAQSFIERMTNFDKNLPNEKVLPKHSLLYEYFTVYNELTKVKYVTEGMRKPAFLSGEQKKAIVDLLFKTNRKVTVKQLKEDYFKKIECFDSVEISGVEDRFNASLGTYHDLLKIIKDKDFLDNEENEDILEDIVLTLTLFEDREMIEERLKTYAHLFDDKVMKQLKRRRYTGWGRLSRKLINGIRDKQSGKTILDFLKSDGFANRNFMQLIHDDSLTFKEDIQKAQVSGQGDSLHEHIANLAGSPAIKKGILQTVKVVDELVKVMGRHKPENIVIEMARENQTTQKGQKNSRERMKRIEEGIKELGSQILKEHPVENTQLQNEKLYLYYLQNGRDMYVDQELDINRLSDYDVDHIVPQSFLKDDSIDNKVLTRSDKNRGKSDNVPSEEVVKKMKNYWRQLLNAKLITQRKFDNLTKAERGGLSELDKAGFIKRQLVETRQITKHVAQILDSRMNTKYDENDKLIREVKVITLKSKLVSDFRKDFQFYKVREINNYHHAHDAYLNAVVGTALIKKYPKLESEFVYGDYKVYDVRKMIAKSEQEIGKATAKYFFYSNIMNFFKTEITLANGEIRKRPLIETNGETGEIVWDKGRDFATVRKVLSMPQVNIVKKTEVQTGGFSKESILPKRNSDKLIARKKDWDPKKYGGFDSPTVAYSVLVVAKVEKGKSKKLKSVKELLGITIMERSSFEKNPIDFLEAKGYKEVKKDLIIKLPKYSLFELENGRKRMLASAGELQKGNELALPSKYVNFLYLASHYEKLKGSPEDNEQKQLFVEQHKHYLDEIIEQISEFSKRVILADANLDKVLSAYNKHRDKPIREQAENIIHLFTLTNLGAPAAFKYFDTTIDRKRYTSTKEVLDATLIHQSITGLYETRIDLSQLGGD

SEQ ID NO: 34 - protein, 1368 aa, Streptococcus pyogenes
MDKKYSIGLDIGTNSVGWAVITDEYKVPSKKFKVLGNTDRHSIKKNLIGALLFDSGETAEATRLKRTARRRYTRRKNRICYLQEIFSNEMAKVDDSFFHRLEESFLVEEDKKHERHPIFGNIVDEVAYHEKYPTIYHLRKKLVDSTDKADLRLIYLALAHMIKFRGHFLIEGDLNPDNSDVDKLFIQLVQTYNQLFEENPINASGVDAKAILSARLSKSRRLENLIAQLPGEKKNGLFGNLIALSLGLTPNFKSNFDLAEDAKLQLSKDTYDDDLDNLLAQIGDQYADLFLAAKNLSDAILLSDILRVNTEITKAPLSASMIKRYDEHHQDLTLLKALVRQQLPEKYKEIFFDQSKNGYAGYIDGGASQEEFYKFIKPILEKMDGTEELLVKLNREDLLRKQRTFDNGSIPHQIHLGELHAILRRQEDFYPFLKDNREKIEKILTFRIPYYVGPLARGNSRFAWMTRKSEETITPWNFEEVVDKGASAQSFIERMTNFDKNLPNEKVLPKHSLLYEYFTVYNELTKVKYVTEGMRKPAFLSGEQKKAIVDLLFKTNRKVTVKQLKEDYFKKIECFDSVEISGVEDRFNASLGTYHDLLKIIKDKDFLDNEENEDILEDIVLTLTLFEDREMIEERLKTYAHLFDDKVMKQLKRRRYTGWGRLSRKLINGIRDKQSGKTILDFLKSDGFANRNFMQLIHDDSLTFKEDIQKAQVSGQGDSLHEHIANLAGSPAIKKGILQTVKVVDELVKVMGRHKPENIVIAMARENQTTQKGQKNSRERMKRIEEGIKELGSQILKEHPVENTQLQNEKLYLYYLQNGRDMYVDQELDINRLSDYDVDHIVPQSFLKDDSIDNKVLTRSDKNRGKSDNVPSEEVVKKMKNYWRQLLNAKLITQRKFDNLTKAERGGLSELDKAGFIKRQLVETRQITKHVAQILDSRMNTKYDENDKLIREVKVITLKSKLVSDFRKDFQFYKVREINNYHHAHDAYLNAVVGTALIKKYPKLESEFVYGDYKVYDVRKMIAKSEQEIGKATAKYFFYSNIMNFFKTEITLANGEIRKRPLIETNGETGEIVWDKGRDFATVRKVLSMPQVNIVKKTEVQTGGFSKESILPKRNSDKLIARKKDWDPKKYGGFDSPTVAYSVLVVAKVEKGKSKKLKSVKELLGITIMERSSFEKNPIDFLEAKGYKEVKKDLIIKLPKYSLFELENGRKRMLASAGELQKGNELALPSKYVNFLYLASHYEKLKGSPEDNEQKQLFVEQHKHYLDEIIEQISEFSKRVILADANLDKVLSAYNKHRDKPIREQAENIIHLFTLTNLGAPAAFKYFDTTIDRKRYTSTKEVLDATLIHQSITGLYETRIDLSQLGGD

SEQ ID NO: 35 - protein, 1368 aa, Streptococcus pyogenes
MDKKYSIGLDIGTNSVGWAVITDEYKVPSKKFKVLGNTDRHSIKKNLIGALLFDSGETAEATRLKRTARRRYTRRKNRICYLQEIFSNEMAKVDDSFFHRLEESFLVEEDKKHERHPIFGNIVDEVAYHEKYPTIYHLRKKLVDSTDKADLRLIYLALAHMIKFRGHFLIEGDLNPDNSDVDKLFIQLVQTYNQLFEENPINASGVDAKAILSARLSKSRRLENLIAQLPGEKKNGLFGNLIALSLGLTPNFKSNFDLAEDAKLQLSKDTYDDDLDNLLAQIGDQYADLFLAAKNLSDAILLSDILRVNTEITKAPLSASMIKRYDEHHQDLTLLKALVRQQLPEKYKEIFFDQSKNGYAGYIDGGASQEEFYKFIKPILEKMDGTEELLVKLNREDLLRKQRTFDNGSIPHQIHLGELHAILRRQEDFYPFLKDNREKIEKILTFRIPYYVGPLARGNSRFAWMTRKSEETITPWNFEEVVDKGASAQSFIERMTNFDKNLPNEKVLPKHSLLYEYFTVYNELTKVKYVTEGMRKPAFLSGEQKKAIVDLLFKTNRKVTVKQLKEDYFKKIECFDSVEISGVEDRFNASLGTYHDLLKIIKDKDFLDNEENEDILEDIVLTLTLFEDREMIEERLKTYAHLFDDKVMKQLKRRRYTGWGRLSRKLINGIRDKQSGKTILDFLKSDGFANRNFMQLIHDDSLTFKEDIQKAQVSGQGDSLHEHIANLAGSPAIKKGILQTVKVVDELVKVMGRHKPENIVIEMARENQTTQKGQKNSRERMKRIEEGIKELGSQILKEHPVENTQLQNEKLYLYYLQNGRDMYVDQELDINRLSDYDVDHIVPQSFLKDDSIDNKVLTRSDKNRGKSDNVPSEEVVKKMKNYWRQLLNAKLITQRKFDNLTKAERGGLSELDKAGFIKRQLVETRQITKHVAQILDSRMNTKYDENDKLIREVKVITLKSKLVSDFRKDFQFYKVREINNYHAAHDAYLNAVVGTALIKKYPKLESEFVYGDYKVYDVRKMIAKSEQEIGKATAKYFFYSNIMNFFKTEITLANGEIRKRPLIETNGETGEIVWDKGRDFATVRKVLSMPQVNIVKKTEVQTGGFSKESILPKRNSDKLIARKKDWDPKKYGGFDSPTVAYSVLVVAKVEKGKSKKLKSVKELLGITIMERSSFEKNPIDFLEAKGYKEVKKDLIIKLPKYSLFELENGRKRMLASAGELQKGNELALPSKYVNFLYLASHYEKLKGSPEDNEQKQLFVEQHKHYLDEIIEQISEFSKRVILADANLDKVLSAYNKHRDKPIREQAENIIHLFTLTNLGAPAAFKYFDTTIDRKRYTSTKEVLDATLIHQSITGLYETRIDLSQLGGD

SEQ ID NO: 36 - protein, 1368 aa, Streptococcus pyogenes
MDKKYSIGLDIGTNSVGWAVITDEYKVPSKKFKVLGNTDRHSIKKNLIGALLFDSGETAEATRLKRTARRRYTRRKNRICYLQEIFSNEMAKVDDSFFHRLEESFLVEEDKKHERHPIFGNIVDEVAYHEKYPTIYHLRKKLVDSTDKADLRLIYLALAHMIKFRGHFLIEGDLNPDNSDVDKLFIQLVQTYNQLFEENPINASGVDAKAILSARLSKSRRLENLIAQLPGEKKNGLFGNLIALSLGLTPNFKSNFDLAEDAKLQLSKDTYDDDLDNLLAQIGDQYADLFLAAKNLSDAILLSDILRVNTEITKAPLSASMIKRYDEHHQDLTLLKALVRQQLPEKYKEIFFDQSKNGYAGYIDGGASQEEFYKFIKPILEKMDGTEELLVKLNREDLLRKQRTFDNGSIPHQIHLGELHAILRRQEDFYPFLKDNREKIEKILTFRIPYYVGPLARGNSRFAWMTRKSEETITPWNFEEVVDKGASAQSFIERMTNFDKNLPNEKVLPKHSLLYEYFTVYNELTKVKYVTEGMRKPAFLSGEQKKAIVDLLFKTNRKVTVKQLKEDYFKKIECFDSVEISGVEDRFNASLGTYHDLLKIIKDKDFLDNEENEDILEDIVLTLTLFEDREMIEERLKTYAHLFDDKVMKQLKRRRYTGWGRLSRKLINGIRDKQSGKTILDFLKSDGFANRNFMQLIHDDSLTFKEDIQKAQVSGQGDSLHEHIANLAGSPAIKKGILQTVKVVDELVKVMGRHKPENIVIEMARENQTTQKGQKNSRERMKRIEEGIKELGSQILKEHPVENTQLQNEKLYLYYLQNGRDMYVDQELDINRLSDYDVDHIVPQSFLKDDSIDNKVLTRSDKNRGKSDNVPSEEVVKKMKNYWRQLLNAKLITQRKFDNLTKAERGGLSELDKAGFIKRQLVETRQITKHVAQILDSRMNTKYDENDKLIREVKVITLKSKLVSDFRKDFQFYKVREINNYHHAHAAYLNAVVGTALIKKYPKLESEFVYGDYKVYDVRKMIAKSEQEIGKATAKYFFYSNIMNFFKTEITLANGEIRKRPLIETNGETGEIVWDKGRDFATVRKVLSMPQVNIVKKTEVQTGGFSKESILPKRNSDKLIARKKDWDPKKYGGFDSPTVAYSVLVVAKVEKGKSKKLKSVKELLGITIMERSSFEKNPIDFLEAKGYKEVKKDLIIKLPKYSLFELENGRKRMLASAGELQKGNELALPSKYVNFLYLASHYEKLKGSPEDNEQKQLFVEQHKHYLDEIIEQISEFSKRVILADANLDKVLSAYNKHRDKPIREQAENIIHLFTLTNLGAPAAFKYFDTTIDRKRYTSTKEVLDATLIHQSITGLYETRIDLSQLGGD

SEQ ID NO: 37 - protein, 1368 aa, Streptococcus pyogenes
  misc_feature (840)..(840): Xaa can be any naturally occurring amino acid
MDKKYSIGLDIGTNSVGWAVITDEYKVPSKKFKVLGNTDRHSIKKNLIGALLFDSGETAEATRLKRTARRRYTRRKNRICYLQEIFSNEMAKVDDSFFHRLEESFLVEEDKKHERHPIFGNIVDEVAYHEKYPTIYHLRKKLVDSTDKADLRLIYLALAHMIKFRGHFLIEGDLNPDNSDVDKLFIQLVQTYNQLFEENPINASGVDAKAILSARLSKSRRLENLIAQLPGEKKNGLFGNLIALSLGLTPNFKSNFDLAEDAKLQLSKDTYDDDLDNLLAQIGDQYADLFLAAKNLSDAILLSDILRVNTEITKAPLSASMIKRYDEHHQDLTLLKALVRQQLPEKYKEIFFDQSKNGYAGYIDGGASQEEFYKFIKPILEKMDGTEELLVKLNREDLLRKQRTFDNGSIPHQIHLGELHAILRRQEDFYPFLKDNREKIEKILTFRIPYYVGPLARGNSRFAWMTRKSEETITPWNFEEVVDKGASAQSFIERMTNFDKNLPNEKVLPKHSLLYEYFTVYNELTKVKYVTEGMRKPAFLSGEQKKAIVDLLFKTNRKVTVKQLKEDYFKKIECFDSVEISGVEDRFNASLGTYHDLLKIIKDKDFLDNEENEDILEDIVLTLTLFEDREMIEERLKTYAHLFDDKVMKQLKRRRYTGWGRLSRKLINGIRDKQSGKTILDFLKSDGFANRNFMQLIHDDSLTFKEDIQKAQVSGQGDSLHEHIANLAGSPAIKKGILQTVKVVDELVKVMGRHKPENIVIEMARENQTTQKGQKNSRERMKRIEEGIKELGSQILKEHPVENTQLQNEKLYLYYLQNGRDMYVDQELDINRLSDYDVDXIVPQSFLKDDSIDNKVLTRSDKNRGKSDNVPSEEVVKKMKNYWRQLLNAKLITQRKFDNLTKAERGGLSELDKAGFIKRQLVETRQITKHVAQILDSRMNTKYDENDKLIREVKVITLKSKLVSDFRKDFQFYKVREINNYHHAHDAYLNAVVGTALIKKYPKLESEFVYGDYKVYDVRKMIAKSEQEIGKATAKYFFYSNIMNFFKTEITLANGEIRKRPLIETNGETGEIVWDKGRDFATVRKVLSMPQVNIVKKTEVQTGGFSKESILPKRNSDKLIARKKDWDPKKYGGFDSPTVAYSVLVVAKVEKGKSKKLKSVKELLGITIMERSSFEKNPIDFLEAKGYKEVKKDLIIKLPKYSLFELENGRKRMLASAGELQKGNELALPSKYVNFLYLASHYEKLKGSPEDNEQKQLFVEQHKHYLDEIIEQISEFSKRVILADANLDKVLSAYNKHRDKPIREQAENIIHLFTLTNLGAPAAFKYFDTTIDRKRYTSTKEVLDATLIHQSITGLYETRIDLSQLGGD

SEQ ID NO: 38 - protein, 1368 aa, Streptococcus pyogenes
MDKKYSIGLDIGTNSVGWAVITDEYKVPSKKFKVLGNTDRHSIKKNLIGALLFDSGETAEATRLKRTARRRYTRRKNRICYLQEIFSNEMAKVDDSFFHRLEESFLVEEDKKHERHPIFGNIVDEVAYHEKYPTIYHLRKKLVDSTDKADLRLIYLALAHMIKFRGHFLIEGDLNPDNSDVDKLFIQLVQTYNQLFEENPINASGVDAKAILSARLSKSRRLENLIAQLPGEKKNGLFGNLIALSLGLTPNFKSNFDLAEDAKLQLSKDTYDDDLDNLLAQIGDQYADLFLAAKNLSDAILLSDILRVNTEITKAPLSASMIKRYDEHHQDLTLLKALVRQQLPEKYKEIFFDQSKNGYAGYIDGGASQEEFYKFIKPILEKMDGTEELLVKLNREDLLRKQRTFDNGSIPHQIHLGELHAILRRQEDFYPFLKDNREKIEKILTFRIPYYVGPLARGNSRFAWMTRKSEETITPWNFEEVVDKGASAQSFIERMTNFDKNLPNEKVLPKHSLLYEYFTVYNELTKVKYVTEGMRKPAFLSGEQKKAIVDLLFKTNRKVTVKQLKEDYFKKIECFDSVEISGVEDRFNASLGTYHDLLKIIKDKDFLDNEENEDILEDIVLTLTLFEDREMIEERLKTYAHLFDDKVMKQLKRRRYTGWGRLSRKLINGIRDKQSGKTILDFLKSDGFANRNFMQLIHDDSLTFKEDIQKAQVSGQGDSLHEHIANLAGSPAIKKGILQTVKVVDELVKVMGRHKPENIVIEMARENQTTQKGQKNSRERMKRIEEGIKELGSQILKEHPVENTQLQNEKLYLYYLQNGRDMYVDQELDINRLSDYDVDAIVPQSFLKDDSIDNKVLTRSDKNRGKSDNVPSEEVVKKMKNYWRQLLNAKLITQRKFDNLTKAERGGLSELDKAGFIKRQLVETRQITKHVAQILDSRMNTKYDENDKLIREVKVITLKSKLVSDFRKDFQFYKVREINNYHHAHDAYLNAVVGTALIKKYPKLESEFVYGDYKVYDVRKMIAKSEQEIGKATAKYFFYSNIMNFFKTEITLANGEIRKRPLIETNGETGEIVWDKGRDFATVRKVLSMPQVNIVKKTEVQTGGFSKESILPKRNSDKLIARKKDWDPKKYGGFDSPTVAYSVLVVAKVEKGKSKKLKSVKELLGITIMERSSFEKNPIDFLEAKGYKEVKKDLIIKLPKYSLFELENGRKRMLASAGELQKGNELALPSKYVNFLYLASHYEKLKGSPEDNEQKQLFVEQHKHYLDEIIEQISEFSKRVILADANLDKVLSAYNKHRDKPIREQAENIIHLFTLTNLGAPAAFKYFDTTIDRKRYTSTKEVLDATLIHQSITGLYETRIDLSQLGGD

SEQ ID NO: 39 - protein, 1368 aa, Streptococcus pyogenes
  misc_feature (864)..(864): Xaa can be any naturally occurring amino acid
MDKKYSIGLDIGTNSVGWAVITDEYKVPSKKFKVLGNTDRHSIKKNLIGALLFDSGETAEATRLKRTARRRYTRRKNRICYLQEIFSNEMAKVDDSFFHRLEESFLVEEDKKHERHPIFGNIVDEVAYHEKYPTIYHLRKKLVDSTDKADLRLIYLALAHMIKFRGHFLIEGDLNPDNSDVDKLFIQLVQTYNQLFEENPINASGVDAKAILSARLSKSRRLENLIAQLPGEKKNGLFGNLIALSLGLTPNFKSNFDLAEDAKLQLSKDTYDDDLDNLLAQIGDQYADLFLAAKNLSDAILLSDILRVNTEITKAPLSASMIKRYDEHHQDLTLLKALVRQQLPEKYKEIFFDQSKNGYAGYIDGGASQEEFYKFIKPILEKMDGTEELLVKLNREDLLRKQRTFDNGSIPHQIHLGELHAILRRQEDFYPFLKDNREKIEKILTFRIPYYVGPLARGNSRFAWMTRKSEETITPWNFEEVVDKGASAQSFIERMTNFDKNLPNEKVLPKHSLLYEYFTVYNELTKVKYVTEGMRKPAFLSGEQKKAIVDLLFKTNRKVTVKQLKEDYFKKIECFDSVEISGVEDRFNASLGTYHDLLKIIKDKDFLDNEENEDILEDIVLTLTLFEDREMIEERLKTYAHLFDDKVMKQLKRRRYTGWGRLSRKLINGIRDKQSGKTILDFLKSDGFANRNFMQLIHDDSLTFKEDIQKAQVSGQGDSLHEHIANLAGSPAIKKGILQTVKVVDELVKVMGRHKPENIVIEMARENQTTQKGQKNSRERMKRIEEGIKELGSQILKEHPVENTQLQNEKLYLYYLQNGRDMYVDQELDINRLSDYDVDHIVPQSFLKDDSIDNKVLTRSDKNXGKSDNVPSEEVVKKMKNYWRQLLNAKLITQRKFDNLTKAERGGLSELDKAGFIKRQLVETRQITKHVAQILDSRMNTKYDENDKLIREVKVITLKSKLVSDFRKDFQFYKVREINNYHHAHDAYLNAVVGTALIKKYPKLESEFVYGDYKVYDVRKMIAKSEQEIGKATAKYFFYSNIMNFFKTEITLANGEIRKRPLIETNGETGEIVWDKGRDFATVRKVLSMPQVNIVKKTEVQTGGFSKESILPKRNSDKLIARKKDWDPKKYGGFDSPTVAYSVLVVAKVEKGKSKKLKSVKELLGITIMERSSFEKNPIDFLEAKGYKEVKKDLIIKLPKYSLFELENGRKRMLASAGELQKGNELALPSKYVNFLYLASHYEKLKGSPEDNEQKQLFVEQHKHYLDEIIEQISEFSKRVILADANLDKVLSAYNKHRDKPIREQAENIIHLFTLTNLGAPAAFKYFDTTIDRKRYTSTKEVLDATLIHQSITGLYETRIDLSQLGGD

SEQ ID NO: 40 - protein, 1368 aa, Streptococcus pyogenes
MDKKYSIGLDIGTNSVGWAVITDEYKVPSKKFKVLGNTDRHSIKKNLIGALLFDSGETAEATRLKRTARRRYTRRKNRICYLQEIFSNEMAKVDDSFFHRLEESFLVEEDKKHERHPIFGNIVDEVAYHEKYPTIYHLRKKLVDSTDKADLRLIYLALAHMIKFRGHFLIEGDLNPDNSDVDKLFIQLVQTYNQLFEENPINASGVDAKAILSARLSKSRRLENLIAQLPGEKKNGLFGNLIALSLGLTPNFKSNFDLAEDAKLQLSKDTYDDDLDNLLAQIGDQYADLFLAAKNLSDAILLSDILRVNTEITKAPLSASMIKRYDEHHQDLTLLKALVRQQLPEKYKEIFFDQSKNGYAGYIDGGASQEEFYKFIKPILEKMDGTEELLVKLNREDLLRKQRTFDNGSIPHQIHLGELHAILRRQEDFYPFLKDNREKIEKILTFRIPYYVGPLARGNSRFAWMTRKSEETITPWNFEEVVDKGASAQSFIERMTNFDKNLPNEKVLPKHSLLYEYFTVYNELTKVKYVTEGMRKPAFLSGEQKKAIVDLLFKTNRKVTVKQLKEDYFKKIECFDSVEISGVEDRFNASLGTYHDLLKIIKDKDFLDNEENEDILEDIVLTLTLFEDREMIEERLKTYAHLFDDKVMKQLKRRRYTGWGRLSRKLINGIRDKQSGKTILDFLKSDGFANRNFMQLIHDDSLTFKEDIQKAQVSGQGDSLHEHIANLAGSPAIKKGILQTVKVVDELVKVMGRHKPENIVIEMARENQTTQKGQKNSRERMKRIEEGIKELGSQILKEHPVENTQLQNEKLYLYYLQNGRDMYVDQELDINRLSDYDVDHIVPQSFLKDDSIDNKVLTRSDKNAGKSDNVPSEEVVKKMKNYWRQLLNAKLITQRKFDNLTKAERGGLSELDKAGFIKRQLVETRQITKHVAQILDSRMNTKYDENDKLIREVKVITLKSKLVSDFRKDFQFYKVREINNYHHAHDAYLNAVVGTALIKKYPKLESEFVYGDYKVYDVRKMIAKSEQEIGKATAKYFFYSNIMNFFKTEITLANGEIRKRPLIETNGETGEIVWDKGRDFATVRKVLSMPQVNIVKKTEVQTGGFSKESILPKRNSDKLIARKKDWDPKKYGGFDSPTVAYSVLVVAKVEKGKSKKLKSVKELLGITIMERSSFEKNPIDFLEAKGYKEVKKDLIIKLPKYSLFELENGRKRMLASAGELQKGNELALPSKYVNFLYLASHYEKLKGSPEDNEQKQLFVEQHKHYLDEIIEQISEFSKRVILADANLDKVLSAYNKHRDKPIREQAENIIHLFTLTNLGAPAAFKYFDTTIDRKRYTSTKEVLDATLIHQSITGLYETRIDLSQLGGD

SEQ ID NO: 41 - protein, 1367 aa, Streptococcus pyogenes
  misc_feature (839)..(839): Xaa can be any naturally occurring amino acid
DKKYSIGLDIGTNSVGWAVITDEYKVPSKKFKVLGNTDRHSIKKNLIGALLFDSGETAEATRLKRTARRRYTRRKNRICYLQEIFSNEMAKVDDSFFHRLEESFLVEEDKKHERHPIFGNIVDEVAYHEKYPTIYHLRKKLVDSTDKADLRLIYLALAHMIKFRGHFLIEGDLNPDNSDVDKLFIQLVQTYNQLFEENPINASGVDAKAILSARLSKSRRLENLIAQLPGEKKNGLFGNLIALSLGLTPNFKSNFDLAEDAKLQLSKDTYDDDLDNLLAQIGDQYADLFLAAKNLSDAILLSDILRVNTEITKAPLSASMIKRYDEHHQDLTLLKALVRQQLPEKYKEIFFDQSKNGYAGYIDGGASQEEFYKFIKPILEKMDGTEELLVKLNREDLLRKQRTFDNGSIPHQIHLGELHAILRRQEDFYPFLKDNREKIEKILTFRIPYYVGPLARGNSRFAWMTRKSEETITPWNFEEVVDKGASAQSFIERMTNFDKNLPNEKVLPKHSLLYEYFTVYNELTKVKYVTEGMRKPAFLSGEQKKAIVDLLFKTNRKVTVKQLKEDYFKKIECFDSVEISGVEDRFNASLGTYHDLLKIIKDKDFLDNEENEDILEDIVLTLTLFEDREMIEERLKTYAHLFDDKVMKQLKRRRYTGWGRLSRKLINGIRDKQSGKTILDFLKSDGFANRNFMQLIHDDSLTFKEDIQKAQVSGQGDSLHEHIANLAGSPAIKKGILQTVKVVDELVKVMGRHKPENIVIEMARENQTTQKGQKNSRERMKRIEEGIKELGSQILKEHPVENTQLQNEKLYLYYLQNGRDMYVDQELDINRLSDYDVDXIVPQSFLKDDSIDNKVLTRSDKNRGKSDNVPSEEVVKKMKNYWRQLLNAKLITQRKFDNLTKAERGGLSELDKAGFIKRQLVETRQITKHVAQILDSRMNTKYDENDKLIREVKVITLKSKLVSDFRKDFQFYKVREINNYHHAHDAYLNAVVGTALIKKYPKLESEFVYGDYKVYDVRKMIAKSEQEIGKATAKYFFYSNIMNFFKTEITLANGEIRKRPLIETNGETGEIVWDKGRDFATVRKVLSMPQVNIVKKTEVQTGGFSKESILPKRNSDKLIARKKDWDPKKYGGFDSPTVAYSVLVVAKVEKGKSKKLKSVKELLGITIMERSSFEKNPIDFLEAKGYKEVKKDLIIKLPKYSLFELENGRKRMLASAGELQKGNELALPSKYVNFLYLASHYEKLKGSPEDNEQKQLFVEQHKHYLDEIIEQISEFSKRVILADANLDKVLSAYNKHRDKPIREQAENIIHLFTLTNLGAPAAFKYFDTTIDRKRYTSTKEVLDATLIHQSITGLYETRIDLSQLGGD

SEQ ID NO: 42 - protein, 1367 aa, Streptococcus pyogenes
DKKYSIGLDIGTNSVGWAVITDEYKVPSKKFKVLGNTDRHSIKKNLIGALLFDSGETAEATRLKRTARRRYTRRKNRICYLQEIFSNEMAKVDDSFFHRLEESFLVEEDKKHERHPIFGNIVDEVAYHEKYPTIYHLRKKLVDSTDKADLRLIYLALAHMIKFRGHFLIEGDLNPDNSDVDKLFIQLVQTYNQLFEENPINASGVDAKAILSARLSKSRRLENLIAQLPGEKKNGLFGNLIALSLGLTPNFKSNFDLAEDAKLQLSKDTYDDDLDNLLAQIGDQYADLFLAAKNLSDAILLSDILRVNTEITKAPLSASMIKRYDEHHQDLTLLKALVRQQLPEKYKEIFFDQSKNGYAGYIDGGASQEEFYKFIKPILEKMDGTEELLVKLNREDLLRKQRTFDNGSIPHQIHLGELHAILRRQEDFYPFLKDNREKIEKILTFRIPYYVGPLARGNSRFAWMTRKSEETITPWNFEEVVDKGASAQSFIERMTNFDKNLPNEKVLPKHSLLYEYFTVYNELTKVKYVTEGMRKPAFLSGEQKKAIVDLLFKTNRKVTVKQLKEDYFKKIECFDSVEISGVEDRFNASLGTYHDLLKIIKDKDFLDNEENEDILEDIVLTLTLFEDREMIEERLKTYAHLFDDKVMKQLKRRRYTGWGRLSRKLINGIRDKQSGKTILDFLKSDGFANRNFMQLIHDDSLTFKEDIQKAQVSGQGDSLHEHIANLAGSPAIKKGILQTVKVVDELVKVMGRHKPENIVIEMARENQTTQKGQKNSRERMKRIEEGIKELGSQILKEHPVENTQLQNEKLYLYYLQNGRDMYVDQELDINRLSDYDVDAIVPQSFLKDDSIDNKVLTRSDKNRGKSDNVPSEEVVKKMKNYWRQLLNAKLITQRKFDNLTKAERGGLSELDKAGFIKRQLVETRQITKHVAQILDSRMNTKYDENDKLIREVKVITLKSKLVSDFRKDFQFYKVREINNYHHAHDAYLNAVVGTALIKKYPKLESEFVYGDYKVYDVRKMIAKSEQEIGKATAKYFFYSNIMNFFKTEITLANGEIRKRPLIETNGETGEIVWDKGRDFATVRKVLSMPQVNIVKKTEVQTGGFSKESILPKRNSDKLIARKKDWDPKKYGGFDSPTVAYSVLVVAKVEKGKSKKLKSVKELLGITIMERSSFEKNPIDFLEAKGYKEVKKDLIIKLPKYSLFELENGRKRMLASAGELQKGNELALPSKYVNFLYLASHYEKLKGSPEDNEQKQLFVEQHKHYLDEIIEQISEFSKRVILADANLDKVLSAYNKHRDKPIREQAENIIHLFTLTNLGAPAAFKYFDTTIDRKRYTSTKEVLDATLIHQSITGLYETRIDLSQLGGD

SEQ ID NO: 43 - protein, 1367 aa, Streptococcus pyogenes
  misc_feature (863)..(863): Xaa can be any naturally occurring amino acid
DKKYSIGLDIGTNSVGWAVITDEYKVPSKKFKVLGNTDRHSIKKNLIGALLFDSGETAEATRLKRTARRRYTRRKNRICYLQEIFSNEMAKVDDSFFHRLEESFLVEEDKKHERHPIFGNIVDEVAYHEKYPTIYHLRKKLVDSTDKADLRLIYLALAHMIKFRGHFLIEGDLNPDNSDVDKLFIQLVQTYNQLFEENPINASGVDAKAILSARLSKSRRLENLIAQLPGEKKNGLFGNLIALSLGLTPNFKSNFDLAEDAKLQLSKDTYDDDLDNLLAQIGDQYADLFLAAKNLSDAILLSDILRVNTEITKAPLSASMIKRYDEHHQDLTLLKALVRQQLPEKYKEIFFDQSKNGYAGYIDGGASQEEFYKFIKPILEKMDGTEELLVKLNREDLLRKQRTFDNGSIPHQIHLGELHAILRRQEDFYPFLKDNREKIEKILTFRIPYYVGPLARGNSRFAWMTRKSEETITPWNFEEVVDKGASAQSFIERMTNFDKNLPNEKVLPKHSLLYEYFTVYNELTKVKYVTEGMRKPAFLSGEQKKAIVDLLFKTNRKVTVKQLKEDYFKKIECFDSVEISGVEDRFNASLGTYHDLLKIIKDKDFLDNEENEDILEDIVLTLTLFEDREMIEERLKTYAHLFDDKVMKQLKRRRYTGWGRLSRKLINGIRDKQSGKTILDFLKSDGFANRNFMQLIHDDSLTFKEDIQKAQVSGQGDSLHEHIANLAGSPAIKKGILQTVKVVDELVKVMGRHKPENIVIEMARENQTTQKGQKNSRERMKRIEEGIKELGSQILKEHPVENTQLQNEKLYLYYLQNGRDMYVDQELDINRLSDYDVDHIVPQSFLKDDSIDNKVLTRSDKNXGKSDNVPSEEVVKKMKNYWRQLLNAKLITQRKFDNLTKAERGGLSELDKAGFIKRQLVETRQITKHVAQILDSRMNTKYDENDKLIREVKVITLKSKLVSDFRKDFQFYKVREINNYHHAHDAYLNAVVGTALIKKYPKLESEFVYGDYKVYDVRKMIAKSEQEIGKATAKYFFYSNIMNFFKTEITLANGEIRKRPLIETNGETGEIVWDKGRDFATVRKVLSMPQVNIVKKTEVQTGGFSKESILPKRNSDKLIARKKDWDPKKYGGFDSPTVAYSVLVVAKVEKGKSKKLKSVKELLGITIMERSSFEKNPIDFLEAKGYKEVKKDLIIKLPKYSLFELENGRKRMLASAGELQKGNELALPSKYVNFLYLASHYEKLKGSPEDNEQKQLFVEQHKHYLDEIIEQISEFSKRVILADANLDKVLSAYNKHRDKPIREQAENIIHLFTLTNLGAPAAFKYFDTTIDRKRYTSTKEVLDATLIHQSITGLYETRIDLSQLGGD

SEQ ID NO: 44 - protein, 1367 aa, Streptococcus pyogenes
DKKYSIGLDIGTNSVGWAVITDEYKVPSKKFKVLGNTDRHSIKKNLIGALLFDSGETAEATRLKRTARRRYTRRKNRICYLQEIFSNEMAKVDDSFFHRLEESFLVEEDKKHERHPIFGNIVDEVAYHEKYPTIYHLRKKLVDSTDKADLRLIYLALAHMIKFRGHFLIEGDLNPDNSDVDKLFIQLVQTYNQLFEENPINASGVDAKAILSARLSKSRRLENLIAQLPGEKKNGLFGNLIALSLGLTPNFKSNFDLAEDAKLQLSKDTYDDDLDNLLAQIGDQYADLFLAAKNLSDAILLSDILRVNTEITKAPLSASMIKRYDEHHQDLTLLKALVRQQLPEKYKEIFFDQSKNGYAGYIDGGASQEEFYKFIKPILEKMDGTEELLVKLNREDLLRKQRTFDNGSIPHQIHLGELHAILRRQEDFYPFLKDNREKIEKILTFRIPYYVGPLARGNSRFAWMTRKSEETITPWNFEEVVDKGASAQSFIERMTNFDKNLPNEKVLPKHSLLYEYFTVYNELTKVKYVTEGMRKPAFLSGEQKKAIVDLLFKTNRKVTVKQLKEDYFKKIECFDSVEISGVEDRFNASLGTYHDLLKIIKDKDFLDNEENEDILEDIVLTLTLFEDREMIEERLKTYAHLFDDKVMKQLKRRRYTGWGRLSRKLINGIRDKQSGKTILDFLKSDGFANRNFMQLIHDDSLTFKEDIQKAQVSGQGDSLHEHIANLAGSPAIKKGILQTVKVVDELVKVMGRHKPENIVIEMARENQTTQKGQKNSRERMKRIEEGIKELGSQILKEHPVENTQLQNEKLYLYYLQNGRDMYVDQELDINRLSDYDVDHIVPQSFLKDDSIDNKVLTRSDKNAGKSDNVPSEEVVKKMKNYWRQLLNAKLITQRKFDNLTKAERGGLSELDKAGFIKRQLVETRQITKHVAQILDSRMNTKYDENDKLIREVKVITLKSKLVSDFRKDFQFYKVREINNYHHAHDAYLNAVVGTALIKKYPKLESEFVYGDYKVYDVRKMIAKSEQEIGKATAKYFFYSNIMNFFKTEITLANGEIRKRPLIETNGETGEIVWDKGRDFATVRKVLSMPQVNIVKKTEVQTGGFSKESILPKRNSDKLIARKKDWDPKKYGGFDSPTVAYSVLVVAKVEKGKSKKLKSVKELLGITIMERSSFEKNPIDFLEAKGYKEVKKDLIIKLPKYSLFELENGRKRMLASAGELQKGNELALPSKYVNFLYLASHYEKLKGSPEDNEQKQLFVEQHKHYLDEIIEQISEFSKRVILADANLDKVLSAYNKHRDKPIREQAENIIHLFTLTNLGAPAAFKYFDTTIDRKRYTSTKEVLDATLIHQSITGLYETRIDLSQLGGD

SEQ ID NO: 45 - protein, 1053 aa, Staphylococcus aureus; identical to SEQ ID NO: 15

SEQ ID NO: 46 - protein, 1082 aa, Neisseria meningitidis
MAAFKPNSINYILGLDIGIASVGWAMVEIDEEENPIRLIDLGVRVFERAEVPKTGDSLAMARRLARSVRRLTRRRAHRLLRTRRLLKREGVLQAANFDENGLIKSLPNTPWQLRAAALDRKLTPLEWSAVLLHLIKHRGYLSQRKNEGETADKELGALLKGVAGNAHALQTGDFRTPAELALNKFEKESGHIRNQRSDYSHTFSRKDLQAELILLFEKQKEFGNPHVSGGLKEGIETLLMTQRPALSGDAVQKMLGHCTFEPAEPKAAKNTYTAERFIWLTKLNNLRILEQGSERPLTDTERATLMDEPYRKSKLTYAQARKLLGLEDTAFFKGLRYGKDNAEASTLMEMKAYHAISRALEKEGLKDKKSPLNLSPELQDEIGTAFSLFKTDEDITGRLKDRIQPEILEALLKHISFDKFVQISLKALRRIVPLMEQGKRYDEACAEIYGDHYGKKNTEEKIYLPPIPADEIRNPVVLRALSQARKVINGVVRRYGSPARIHIETAREVGKSFKDRKEIEKRQEENRKDREKAAAKFREYFPNFVGEPKSKDILKLRLYEQQHGKCLYSGKEINLGRLNEKGYVEIDAALPFSRTWDDSFNNKVLVLGSENQNKGNQTPYEYFNGKDNSREWQEFKARVETSRFPRSKKQRILLQKFDEDGFKERNLNDTRYVNRFLCQFVADRMRLTGKGKKRVFASNGQITNLLRGFWGLRKVRAENDRHHALDAVVVACSTVAMQQKITRFVRYKEMNAFDGKTIDKETGEVLHQKTHFPQPWEFFAQEVMIRVFGKPDGKPEFEEADTLEKLRTLLAEKLSSRPEAVHEYVTPLFVSRAPNRKMSGQGHMETVKSAKRLDEGVSVLRVPLTQLKLKDLEKMVNREREPKLYEALKARLEAHKDDPAKAFAEPFYKYDKAGNRTQQVKAVRVEQVQKTGVWVRNHNGIADNATMVRVDVFEKGDKYYLVPIYSWQVAKGILPDRAVVQGKDEEDWQLIDDSFNFKFSLHPNDLVEVITKKARMFGYFASCHRGTGNINIRIHDLDHKIGKNGILEGIGVKTALSFQKYQIDELGKEIRPCRLKKRPPVR

SEQ ID NO: 47 - protein, 984 aa, Campylobacter jejuni
MARILAFDIGISSIGWAFSENDELKDCGVRIFTKVENPKTGESLALPRRLARSARKRLARRKARLNHLKHLIANEFKLNYEDYQSFDESLAKAYKGSLISPYELRFRALNELLSKQDFARVILHIAKRRGYDDIKNSDDKEKGAILKAIKQNEEKLANYQSVGEYLYKEYFQKFKENSKEFTNVRNKKESYERCIAQSFLKDELKLIFKKQREFGFSFSKKFEEEVLSVAFYKRALKDFSHLVGNCSFFTDEKRAPKNSPLAFMFVALTRIINLLNNLKNTEGILYTKDDLNALLNEVLKNGTLTYKQTKKLLGLSDDYEFKGEKGTYFIEFKKYKEFIKALGEHNLSQDDLNEIAKDITLIKDEIKLKKALAKYDLNQNQIDSLSKLEFKDHLNISFKALKLVTPLMLEGKKYDEACNELNLKVAINEDKKDFLPAFNETYYKDEVTNPVVLRAIKEYRKVLNALLKKYGKVHKINIELAREVGKNHSQRAKIEKEQNENYKAKKDAELECEKLGLKINSKNILKLRLFKEQKEFCAYSGEKIKISDLQDEKMLEIDHIYPYSRSFDDSYMNKVLVFTKQNQEKLNQTPFEAFGNDSAKWQKIEVLAKNLPTKKQKRILDKNYKDKEQKNFKDRNLNDTRYIARLVLNYTKDYLDFLPLSDDENTKLNDTQKGSKVHVEAKSGMLTSALRHTWGFSAKDRNNHLHHAIDAVIIAYANNSIVKAFSDFKKEQESNSAELYAKKISELDYKNKRKFFEPFSGFRQKVLDKIDEIFVSKPERKKPSGALHEETFRKEEEFYQSYGGKEGVLKALELGKIRKVNGKIVKNGDMFRVDIFKHKKTNKFYAVPIYTMDFALKVLPNKAVARSKKGEIKDWILMDENYEFCFSLYKDSLILIQTKDMQEPEFVYYNAFTSSTVSLIVSKHDNKFETLSKNQKILFKNANEKEVIAKSIGIQNLKVFEKYIVSALGEVTKAEFRQREDFKK

SEQ ID NO: 48 - protein, 1087 aa, Geobacillus stearothermophilus
MRYKIGLDIGITSVGWAVMNLDIPRIEDLGVRIFDRAENPQTGESLALPRRLARSARRRLRRRKHRLERIRRLVIREGILTKEELDKLFEEKHEIDVWQLRVEALDRKLNNDELARVLLHLAKRRGFKSNRKSERSNKENSTMLKHIEENRAILSSYRTVGEMIVKDPKFALHKRNKGENYTNTIARDDLEREIRLIFSKQREFGNMSCTEEFENEYITIWASQRPVASKDDIEKKVGFCTFEPKEKRAPKATYTFQSFIAWEHINKLRLISPSGARGLTDEERRLLYEQAFQKNKITYHDIRTLLHLPDDTYFKGIVYDRGESRKQNENIRFLELDAYHQIRKAVDKVYGKGKSSSFLPIDFDTFGYALTLFKDDADIHSYLRNEYEQNGKRMPNLANKVYDNELIEELLNLSFTKFGHLSLKALRSILPYMEQGEVYSSACERAGYTFTGPKKKQKTMLLPNIPPIANPVVMRALTQARKVVNAIIKKYGSPVSIHIELARDLSQTFDERRKTKKEQDENRKKNETAIRQLMEYGLTLNPTGHDIVKFKLWSEQNGRCAYSLQPIEIERLLEPGYVEVDHVIPYSRSLDDSYTNKVLVLTRENREKGNRIPAEYLGVGTERWQQFETFVLTNKQFSKKKRDRLLRLHYDENEETEFKNRNLNDTRYISRFFANFIREHLKFAESDDKQKVYTVNGRVTAHLRSRWEFNKNREESDLHHAVDAVIVACTTPSDIAKVTAFYQRREQNKELAKKTEPHFPQPWPHFADELRARLSKHPKESIKALNLGNYDDQKLESLQPVFVSRMPKRSVTGAAHQETLRRYVGIDERSGKIQTVVKTKLSEIKLDASGHFPMYGKESDPRTYEAIRQRLLEHNNDPKKAFQEPLYKPKKNGEPGPVIRTVKIIDTKNQVIPLNDGKTVAYNSNIVRVDVFEKDGKYYCVPVYTMDIMKGILPNKAIEPNKPYSEWKEMTEDYTFRFSLYPNDLIRIELPREKTVKTAAGEEINVKDVFVYYKTIDSANGGLELISHDHRFSLRGVGSRTLKRFEKYQVDVLGNIYKVRGEKRVGLASSAHSKPGKTIRPLQSTRD

SEQ ID NO: 49 - protein, 1228 aa, Unknown
  Lachnospiraceae bacterium
MSKLEKFTNCYSLSKTLRFKAIPVGKTQENIDNKRLLVEDEKRAEDYKGVKKLLDRYYLSFINDVLHSIKLKNLNNYISLFRKKTRTEKENKELENLEINLRKEIAKAFKGNEGYKSLFKKDIIETILPEFLDDKDEIALVNSFNGFTTAFTGFFDNRENMFSEEAKSTSIAFRCINENLTRYISNMDIFEKVDAIFDKHEVQEIKEKILNSDYDVEDFFEGEFFNFVLTQEGIDVYNAIIGGFVTESGEKIKGLNEYINLYNQKTKQKLPKFKPLYKQVLSDRESLSFYGEGYTSDEEVLEVFRNTLNKNSEIFSSIKKLEKLFKNFDEYSSAGIFVKNGPAISTISKDIFGEWNVIRDKWNAEYDDIHLKKKAVVTEKYEDDRRKSFKKIGSFSLEQLQEYADADLSVVEKLKEIIIQKVDEIYKVYGSSEKLFDADFVLEKSLKKNDAVVAIMKDLLDSVKSFENYIKAFFGEGKETNRDESFYGDFVLAYDILLKVDHIYDAIRNYVTQKPYSKDKFKLYFQNPQFMGGWDKDKETDYRATILRYGSKYYLAIMDKKYAKCLQKIDKDDVNGNYEKINYKLLPGPNKMLPKVFFSKKWMAYYNPSEDIQKIYKNGTFKKGDMFNLNDCHKLIDFFKDSISRYPKWSNAYDFNFSETEKYKDIAGFYREVEEQGYKVSFESASKKEVDKLVEEGKLYMFQIYNKDFSDKSHGTPNLHTMYFKLLFDENNHGQIRLSGGAELFMRRASLKKEELVVHPANSPIANKNPDNPKKTTTLSYDVYKDKRFSEDQYELHIPIAINKCPKNIFKINTEVRVLLKHDDNPYVIGIDRGERNLLYIVVVDGKGNIVEQYSLNEIINNFNGIRIKTDYHSLLDKKEKERFEARQNWTSIENIKELKAGYISQVVHKICELVEKYDAVIALEDLNSGFKNSRVKVEKQVYQKFEKMLIDKLNYMVDKKSNPCATGGALKGYQITNKFESFKSMSTQNGFIFYIPAWLTSKIDPSTGFVNLLKTKYTSIADSKKFISSFDRIMYVPEEDLFEFALDYKNFSRTDADYIKKWKLYSYGNRIRIFRNPKKNNVFDWEEVCLTSAYKELFNKYGINYQQGDIRALLCEQSDKAFYSSFMALMSLMLQMRNSITGRTDVDFLISPVKNSDGIFYDSRNYEAQENAILPKNADANGAYNIARKVLWAIGQFKKAEDEKLDKVKIAISNKEWLEYAQTSVKH

SEQ ID NO: 50 - protein, 1108 aa, Bacillus hisashii
MATRSFILKIEPNEEVKKGLWKTHEVLNHGIAYYMNILKLIRQEAIYEHHEQDPKNPKKVSKAEIQAELWDFVLKMQKCNSFTHEVDKDEVFNILRELYEELVPSSVEKKGEANQLSNKFLYPLVDPNSQSGKGTASSGRKPRWYNLKIAGDPSWEEEKKKWEEDKKKDPLAKILGKLAEYGLIPLFIPYTDSNEPIVKEIKWMEKSRNQSVRRLDKDMFIQALERFLSWESWNLKVKEEYEKVEKEYKTLEERIKEDIQALKALEQYEKERQEQLLRDTLNTNEYRLSKRGLRGWREIIQKWLKMDENEPSEKYLEVFKDYQRKHPREAGDYSVYEFLSKKENHFIWRNHPEYPYLYATFCEIDKKKKDAKQQATFTLADPINHPLWVRFEERSGSNLNKYRILTEQLHTEKLKKKLTVQLDRLIYPTESGGWEEKGKVDIVLLPSRQFYNQIFLDIEEKGKHAFTYKDESIKFPLKGTLGGARVQFDRDHLRRYPHKVESGNVGRIYFNMTVNIEPTESPVSKSLKIHRDDFPKVVNFKPKELTEWIKDSKGKKLKSGIESLEIGLRVMSIDLGQRQAAAASIFEVVDQKPDIEGKLFFPIKGTELYAVHRASFNIKLPGETLVKSREVLRKAREDNLKLMNQKLNFLRNVLHFQQFEDITEREKRVTKWISRQENSDVPLVYQDELIQIRELMYKPYKDWVAFLKQLHKRLEVEIGKEVKHWRKSLSDGRKGLYGISLKNIDEIDRTRKFLLRWSLRPTEPGEVRRLEPGQRFAIDQLNHLNALKEDRLKKMANTIIMHALGYCYDVRKKKWQAKNPACQIILFEDLSNYNPYEERSRFENSKLMKWSRREIPRQVALQGEIYGLQVGEVGAQFSSRFHAKTGSPGIRCSVVTKEKLQDNRFFKNLQREGRLTLDKIAVLKEGDLYPDKGGEKFISLSKDRKCVTTHADINAAQNLQKRFWTRTHGFYKVYCKAYQVDGQTVYIPESKDQKQKIIEEFGEGYFILKDGVYEWVNAGKLKIKKGSSKQSSSELVDSDILKDSFDLASELKGEKLMLYRDPSGNVFPSDKWMAAGVFFGKLERILISKLTNQYSISTIEDDSSKQSM

SEQ ID NO: 51 - protein, 1307 aa, Acidaminococcus sp
MTQFEGFTNLYQVSKTLRFELIPQGKTLKHIQEQGFIEEDKARNDHYKELKPIIDRIYKTYADQCLQLVQLDWENLSAAIDSYRKEKTEETRNALIEEQATYRNAIHDYFIGRTDNLTDAINKRHAEIYKGLFKAELFNGKVLKQLGTVTTTEHENALLRSFDKFTTYFSGFYENRKNVFSAEDISTAIPHRIVQDNFPKFKENCHIFTRLITAVPSLREHFENVKKAIGIFVSTSIEEVFSFPFYNQLLTQTQIDLYNQLLGGISREAGTEKIKGLNEVLNLAIQKNDETAHIIASLPHRFIPLFKQILSDRNTLSFILEEFKSDEEVIQSFCKYKTLLRNENVLETAEALFNELNSIDLTHIFISHKKLETISSALCDHWDTLRNALYERRISELTGKITKSAKEKVQRSLKHEDINLQEIISAAGKELSEAFKQKTSEILSHAHAALDQPLPTTLKKQEEKEILKSQLDSLLGLYHLLDWFAVDESNEVDPEFSARLTGIKLEMEPSLSFYNKARNYATKKPYSVEKFKLNFQMPTLASGWDVNKEKNNGAILFVKNGLYYLGIMPKQKGRYKALSFEPTEKTSEGFDKMYYDYFPDAAKMIPKCSTQLKAVTAHFQTHTTPILLSNNFIEPLEITKEIYDLNNPEKEPKKFQTAYAKKTGDQKGYREALCKWIDFTRDFLSKYTKTTSIDLSSLRPSSQYKDLGEYYAELNPLLYHISFQRIAEKEIMDAVETGKLYLFQIYNKDFAKGHHGKPNLHTLYWTGLFSPENLAKTSIKLNGQAELFYRPKSRMKRMAHRLGEKMLNKKLKDQKTPIPDTLYQELYDYVNHRLSHDLSDEARALLPNVITKEVSHEIIKDRRFTSDKFFFHVPITLNYQAANSPSKFNQRVNAYLKEHPETPIIGIDRGERNLIYITVIDSTGKILEQRSLNTIQQFDYQKKLDNREKERVAARQAWSVVGTIKDLKQGYLSQVIHEIVDLMIHYQAVVVLENLNFGFKSKRTGIAEKAVYQQFEKMLIDKLNCLVLKDYPAEKVGGVLNPYQLTDQFTSFAKMGTQSGFLFYVPAPYTSKIDPLTGFVDPFVWKTIKNHESRKHFLEGFDFLHYDVKTGDFILHFKMNRNLSFQRGLPGFMPAWDIVFEKNETQFDAKGTPFIAGKRIVPVIENHRFTGRYRDLYPANELIALLEEKGIVFRDGSNILPKLLENDDSHAIDTMVALIRSVLQMRNSNAATGEDYINSPVRDLNGVCFDSRFQNPEWPMDADANGAYHIALKGQLLLNHLKESKDLKLQNGISNQDWLAYIQELRN

SEQ ID NO: 52 - protein, 1307 aa, Artificial Sequence
  Synthetic
MTQFEGFTNLYQVSKTLRFELIPQGKTLKHIQEQGFIEEDKARNDHYKELKPIIDRIYKTYADQCLQLVQLDWENLSAAIDSYRKEKTEETRNALIEEQATYRNAIHDYFIGRTDNLTDAINKRHAEIYKGLFKAELFNGKVLKQLGTVTTTEHENALLRSFDKFTTYFSGFYENRKNVFSAEDISTAIPHRIVQDNFPKFKENCHIFTRLITAVPSLREHFENVKKAIGIFVSTSIEEVFSFPFYNQLLTQTQIDLYNQLLGGISREAGTEKIKGLNEVLNLAIQKNDETAHIIASLPHRFIPLFKQILSDRNTLSFILEEFKSDEEVIQSFCKYKTLLRNENVLETAEALFNELNSIDLTHIFISHKKLETISSALCDHWDTLRNALYERRISELTGKITKSAKEKVQRSLKHEDINLQEIISAAGKELSEAFKQKTSEILSHAHAALDQPLPTTLKKQEEKEILKSQLDSLLGLYHLLDWFAVDESNEVDPEFSARLTGIKLEMEPSLSFYNKARNYATKKPYSVEKFKLNFQMPTLASGWDVNKEKNNGAILFVKNGLYYLGIMPKQKGRYKALSFEPTEKTSEGFDKMYYDYFPDAAKMIPKCSTQLKAVTAHFQTHTTPILLSNNFIEPLEITKEIYDLNNPEKEPKKFQTAYAKKTGDQKGYREALCKWIDFTRDFLSKYTKTTSIDLSSLRPSSQYKDLGEYYAELNPLLYHISFQRIAEKEIMDAVETGKLYLFQIYNKDFAKGHHGKPNLHTLYWTGLFSPENLAKTSIKLNGQAELFYRPKSRMKRMAHRLGEKMLNKKLKDQKTPIPDTLYQELYDYVNHRLSHDLSDEARALLPNVITKEVSHEIIKDRRFTSDKFFFHVPITLNYQAANSPSKFNQRVNAYLKEHPETPIIGIDRGERNLIYITVIDSTGKILEQRSLNTIQQFDYQKKLDNREKERVAARQAWSVVGTIKDLKQGYLSQVIHEIVDLMIHYQAVVVLENLNFGFKSKRTGIAEKAVYQQFEKMLIDKLNCLVLKDYPAEKVGGVLNPYQLTDQFTSFAKMGTQSGFLFYVPAPYTSKIDPLTGFVDPFVWKTIKNHESRKHFLEGFDFLHYDVKTGDFILHFKMNRNLSFQRGLPGFMPAWDIVFEKNETQFDAKGTPFIAGKRIVPVIENHRFTGRYRDLYPANELIALLEEKGIVFRDGSNILPKLLENDDSHAIDTMVALIRSVLQMANSNAATGEDYINSPVRDLNGVCFDSRFQNPEWPMDADANGAYHIALKGQLLLNHLKESKDLKLQNGISNQDWLAYIQELRN

SEQ ID NO: 53 - protein, 1259 aa, Unknown
  Lachnospiraceae bacterium
MNYKTGLEDFIGKESLSKTLRNALIPTESTKIHMEEMGVIRDDELRAEKQQELKEIMDDYYRTFIEEKLGQIQGIQWNSLFQKMEETMEDISVRKDLDKIQNEKRKEICCYFTSDKRFKDLFNAKLITDILPNFIKDNKEYTEEEKAEKEQTRVLFQRFATAFTNYFNQRRNNFSEDNISTAISFRIVNENSEIHLQNMRAFQRIEQQYPEEVCGMEEEYKDMLQEWQMKHIYSVDFYDRELTQPGIEYYNGICGKINEHMNQFCQKNRINKNDFRMKKLHKQILCKKSSYYEIPFRFESDQEVYDALNEFIKTMKKKEIIRRCVHLGQECDDYDLGKIYISSNKYEQISNALYGSWDTIRKCIKEEYMDALPGKGEKKEEKAEAAAKKEEYRSIADIDKIISLYGSEMDRTISAKKCITEICDMAGQISIDPLVCNSDIKLLQNKEKTTEIKTILDSFLHVYQWGQTFIVSDIIEKDSYFYSELEDVLEDFEGITTLYNHVRSYVTQKPYSTVKFKLHFGSPTLANGWSQSKEYDNNAILLMRDQKFYLGIFNVRNKPDKQIIKGHEKEEKGDYKKMIYNLLPGPSKMLPKVFITSRSGQETYKPSKHILDGYNEKRHIKSSPKFDLGYCWDLIDYYKECIHKHPDWKNYDFHFSDTKDYEDISGFYREVEMQGYQIKWTYISADEIQKLDEKGQIFLFQIYNKDFSVHSTGKDNLHTMYLKNLFSEENLKDIVLKLNGEAELFFRKASIKTPIVHKKGSVLVNRSYTQTVGNKEIRVSIPEEYYTEIYNYLNHIGKGKLSSEAQRYLDEGKIKSFTATKDIVKNYRYCCDHYFLHLPITINFKAKSDVAVNERTLAYIAKKEDIHIIGIDRGERNLLYISVVDVHGNIREQRSFNIVNGYDYQQKLKDREKSRDAARKNWEEIEKIKELKEGYLSMVIHYIAQLVVKYNAVVAMEDLNYGFKTGRFKVERQVYQKFETMLIEKLHYLVFKDREVCEEGGVLRGYQLTYIPESLKKVGKQCGFIFYVPAGYTSKIDPTTGFVNLFSFKNLTNRESRQDFVGKFDEIRYDRDKKMFEFSFDYNNYIKKGTILASTKWKVYTNGTRLKRIVVNGKYTSQSMEVELTDAMEKMLQRAGIEYHDGKDLKGQIVEKGIEAEIIDIFRLTVQMRNSRSESEDREYDRLISPVLNDKGEFFDTATADKTLPQDADANGAYCIALKGLYEVKQIKENWKENEQFPRNKLVQDNKTWFDFMQKKRYL

SEQ ID NO: 54 - protein, 1306 aa, Prevotella copri
MAKNFEDFKRLYSLSKTLRFEAKPIGATLDNIVKSGLLDEDEHRAASYVKVKKLIDEYHKVFIDRVLDDGCLPLENKGNNNSLAEYYESYVSRAQDEDAKKKFKEIQQNLRSVIAKKLTEDKAYANLFGNKLIESYKDKEDKKKIIDSDLIQFINTAESTQLDSMSQDEAKELVKEFWGFVTYFYGFFDNRKNMYTAEEKSTGIAYRLVNENLPKFIDNIEAFNRAITRPEIQENMGVLYSDFSEYLNVESIQEMFQLDYYNMLLTQKQIDVYNAIIGGKTDDEHDVKIKGINEYINLYNQQHKDDKLPKLKALFKQILSDRNAISWLPEEFNSDQEVLNAIKDCYERLAENVLGDKVLKSLLGSLADYSLDGIFIRNDLQLTDISQKMFGNWGVIQNAIMQNIKRVAPARKHKESEEDYEKRIAGIFKKADSFSISYINDCLNEADPNNAYFVENYFATFGAVNTPTMQRENLFALVQNAYTEVAALLHSDYPTVKHLAQDKANVSKIKALLDAIKSLQHFVKPLLGKGDESDKDERFYGELASLWAELDTVTPLYNMIRNYMTRKPYSQKKIKLNFENPQLLGGWDANKEKDYATIILRRNGLYYLAIMDKDSRKLLGKAMPSDGECYEKMVYKFFKDVTTMIPKCSTQLKDVQAYFKVNTDDYVLNSKAFNKPLTITKEVFDLNNVLYGKYKKFQKGYLTATGDNVGYTHAVNVWIKFCMDFLNSYDSTCIYDFSSLKPESYLSLDAFYQDANLLLYKLSFARASVSYINQLVEEGKMYLFQIYNKDFSEYSKGTPNMHTLYWKALFDERNLADVVYKLNGQAEMFYRKKSIENTHPTHPANHPILNKNKDNKKKESLFDYDLIKDRRYTVDKFMFHVPITMNFKSVGSENINQDVKAYLRHADDMHIIGIDRGERHLLYLVVIDLQGNIKEQYSLNEIVNEYNGNTYHTNYHDLLDVREEERLKARQSWQTIENIKELKEGYLSQVIHKITQLMVRYHAIVVLEDLSKGFMRSRQKVEKQVYQKFEKMLIDKLNYLVDKKTDVSTPGGLLNAYQLTCKSDSSQKLGKQSGFLFYIPAWNTSKIDPVTGFVNLLDTHSLNSKEKIKAFFSKFDAIRYNKDKKWFEFNLDYDKFGKKAEDTRTKWTLCTRGMRIDTFRNKEKNSQWDNQEVDLTTEMKSLLEHYYIDIHGNLKDAISAQTDKAFFTGLLHILKLTLQMRNSITGTETDYLVSPVADENGIFYDSRSCGNQLPENADANGAYNIARKGLMLIEQIKNAEDLNNVKFDISNKAWLNFAQQKPYKNG

SEQ ID NO: 55 - protein, 1142 aa, Eubacterium rectale
MFSAKLISDILPEFVIHNNNYSASEKEEKTQVIKLFSRFATSFKDYFKNRANCFSANDISSSSCHRIVNDNAEIFFSNALVYRRIVKNLSNDDINKISGDMKDSLKEMSLEEIYSYEKYGEFITQEGISFYNDICGKVNLFMNLYCQKNKENKNLYKLRKLHKQILCIADTSYEVPYKFESDEEVYQSVNGFLDNISSKHIVERLRKIGENYNGYNLDKIYIVSKFYESVSQKTYRDWETINTALEIHYNNILPGNGKSKADKVKKAVKNDLQKSITEINELVSNYKLCPDDNIKAETYIHEISHILNNFEAQELKYNPEIHLVESELKASELKNVLDVIMNAFHWCSVFMTEELVDKDNNFYAELEEIYDEIYPVISLYNLVRNYVTQKPYSTKKIKLNFGIPTLADGWSKSKEYSNNAIILMRDNLYYLGIFNAKNKPDKKIIEGNTSENKGDYKKMIYNLLPGPNKMIPKVFLSSKTGVETYKPSAYILEGYKQNKHLKSSKDFDITFCHDLIDYFKNCIAIHPEWKNFGFDFSDTSTYEDISGFYREVELQGYKIDWTYISEKDIDLLQEKGQLYLFQIYNKDFSKKSSGNDNLHTMYLKNLFSEENLKDIVLKLNGEAEIFFRKSSIKNPIIHKKGSILVNRTYEAEEKDQFGNIQIVRKTIPENIYQELYKYFNDKSDKELSDEAAKLKNVVGHHEAATNIVKDYRYTYDKYFLHMPITINFKANKTSFINDRILQYIAKEKDLHVIGIDRGERNLIYVSVIDTCGNIVEQKSFNIVNGYDYQIKLKQQEGARQIARKEWKEIGKIKEIKEGYLSLVIHEISKMVIKYNAIIAMEDLSYGFKKGRFKVERQVYQKFETMLINKLNYLVFKDISITENGGLLKGYQLTYIPDKLKNVGHQCGCIFYVPAAYTSKIDPTTGFVNIFKFKDLTVDAKREFIKKFDSIRYDSDKNLFCFTFDYNNFITQNTVMSKSSWSVYTYGVRIKRRFVNGRFSNESDTIDITKDMEKTLEMTDINWRDGHDLRQDIIDYEIVQHIFEIFKLTVQMRNSLSELEDRDYDRLISPVLNENNIFYDSAKAGDALPKDADANGAYCIALKGLYEIKQITENWKEDGKFSRDKLKISNKDWFDFIQNKRYL

SEQ ID NO: 56 - protein, 1259 aa, Unknown
  Lachnospiraceae bacterium
MNYKTGLEDFIGKESLSKTLRNALIPTESTKIHMEEMGVIRDDELRAEKQQELKEIMDDYYRAFIEEKLGQIQGIQWNSLFQKMEETMEDISVRKDLDKIQNEKRKEICCYFTSDKRFKDLFNAKLITDILPNFIKDNKEYTEEEKAEKEQTRVLFQRFATAFTNYFNQRRNNFSEDNISTAISFRIVNENSEIHLQNMRAFQRIEQQYPEEVCGMEEEYKDMLQEWQMKHIYLVDFYDRVLTQPGIEYYNGICGKINEHMNQFCQKNRINKNDFRMKKLHKQILCKKSSYYEIPFRFESDQEVYDALNEFIKTMKEKEIICRCVHLGQKCDDYDLGKIYISSNKYEQISNALYGSWDTIRKCIKEEYMDALPGKGEKKEEKAEAAAKKEEYRSIADIDKIISLYGSEMDRTISAKKCITEICDMAGQISTDPLVCNSDIKLLQNKEKTTEIKTILDSFLHVYQWGQTFIVSDIIEKDSYFYSELEDVLEDFEGITTLYNHVRSYVTQKPYSTVKFKLHFGSPTLANGWSQSKEYDNNAILLMRDQKFYLGIFNVRNKPDKQIIKGHEKEEKGDYKKMIYNLLPGPSKMLPKVFITSRSGQETYKPSKHILDGYNEKRHIKSSPKFDLGYCWDLIDYYKECIHKHPDWKNYDFHFSDTKDYEDISGFYREVEMQGYQIKWTYISADEIQKLDEKGQIFLFQIYNKDFSVHSTGKDNLHTMYLKNLFSEENLKDIVLKLNGEAELFFRKASIKTPVVHKKGSVLVNRSYTQTVGDKEIRVSIPEEYYTEIYNYLNHIGRGKLSTEAQRYLEERKIKSFTATKDIVKNYRYCCDHYFLHLPITINFKAKSDIAVNERTLAYIAKKEDIHIIGIDRGERNLLYISVVDVHGNIREQRSFNIVNGYDYQQKLKDREKSRDAARKNWEEIEKIKELKEGYLSMVIHYIAQLVVKYNAVVAMEDLNYGFKTGRFKVERQVYQKFETMLIEKLHYLVFKDREVCEEGGVLRGYQLTYIPESLKKVGKQCGFIFYVPAGYTSKIDPTTGFVNLFSFKNLTNRESRQDFVGKFDEIRYDRDKKMFEFSFDYNNYIKKGTMLASTKWKVYTNGTRLKRIVVNGKYTSQSMEVELTDAMEKMLQRAGIEYHDGKDLKGQIVEKGIEAEIIDIFRLTVQMRNSRSESEDREYDRLISPVLNDKGEFFDTATADKTLPQDADANGAYCIALKGLYEVKQIKENWKENEQFPRNKLVQDNKTWFDFMQKKRYL

SEQ ID NO: 57 - protein, 1108 aa, Bacillus hisashii; identical to SEQ ID NO: 50

SEQ ID NO: 58 - protein, 1465 aa, Thermomonas hydrothermalis
MSEKTTQRAYTLRLNRASGECAVCQNNSCDCWHDALWATHKAVNRGAKAFGDWLLTLRGGLCHTLVEMEVPAKGNNPPQRPTDQERRDRRVLLALSWLSVEDEHGAPKEFIVATGRDSADDRAKKVEEKLREILEKRDFQEHEIDAWLQDCGPSLKAHIREDAVWVNRRALFDAAVERIKTLTWEEAWDFLEPFFGTQYFAGIGDGKDKDDAEGPARQGEKAKDLVQKAGQWLSARFGIGTGADFMSMAEAYEKIAKWASQAQNGDNGKATIEKLACALRPSEPPTLDTVLKCISGPGHKSATREYLKTLDKKSTVTQEDLNQLRKLADEDARNCRKKVGKKGKKPWADEVLKDVENSCELTYLQDNSPARHREFSVMLDHAARRVSMAHSWIKKAEQRRRQFESDAQKLKNLQERAPSAVEWLDRFCESRSMTTGANTGSGYRIRKRAIEGWSYVVQAWAEASCDTEDKRIAAARKVQADPEIEKFGDIQLFEALAADEAICVWRDQEGTQNPSILIDYVTGKTAEHNQKRFKVPAYRHPDELRHPVFCDFGNSRWSIQFAIHKEIRDRDKGAKQDTRQLQNRHGLKMRLWNGRSMTDVNLHWSSKRLTADLALDQNPNPNPTEVTRADRLGRAASSAFDHVKIKNVFNEKEWNGRLQAPRAELDRIAKLEEQGKTEQAEKLRKRLRWYVSFSPCLSPSGPFIVYAGQHNIQPKRSGQYAPHAQANKGRARLAQLILSRLPDLRILSVDLGHRFAAACAVWETLSSDAFRREIQGLNVLAGGSGEGDLFLHVEMTGDDGKRRTVVYRRIGPDQLLDNTPHPAPWARLDRQFLIKLQGEDEGVREASNEELWTVHKLEVEVGRTVPLIDRMVRSGFGKTEKQKERLKKLRELGWISAMPNEPSAETDEKEGEIRSISRSVDELMSSALGTLRLALKRHGNRARIAFAMTADYKPMPGGQKYYFHEAKEASKNDDETKRRDNQIEFLQDALSLWHDLFSSPDWEDNEAKKLWQNHIATLPNYQTPEEISAELKRVERNKKRKENRDKLRTAAKALAENDQLRQHLHDTWKERWESDDQQWKERLRSLKDWIFPRGKAEDNPSIRHVGGLSITRINTISGLYQILKAFKMRPEPDDLRKNIPQKGDDELENFNRRLLEARDRLREQRVKQLASRIIEAALGVGRIKIPKNGKLPKRPRTTVDTPCHAVVIESLKTYRPDDLRTRRENRQLMQWSSAKVRKYLKEGCELYGLHFLEVPANYTSRQCSRTGLPGIRCDDVPTGDFLKAPWWRRAINTAREKNGGDAKDRFLVDLYDHLNNLQSKGEALPATVRVPRQGGNLFIAGAQLDDTNKERRAIQADLNAAANIGLRALLDPDWRGRWWYVPCKDGTSEPALDRIEGSTAFNDVRSLPTGDNSSRRAPREIENLWRDPSGDSLESGTWSPTRAYWDTVQSRVIELLRRHAGLPTS

SEQ ID NO: 59 - protein, 1090 aa, Laceyella sacchari
MSIRSFKLKLKTKSGVNAEQLRRGLWRTHQLINDGIAYYMNWLVLLRQEDLFIRNKETNEIEKRSKEEIQAVLLERVHKQQQRNQWSGEVDEQTLLQALRQLYEEIVPSVIGKSGNASLKARFFLGPLVDPNNKTTKDVSKSGPTPKWKKMKDAGDPNWVQEYEKYMAERQTLVRLEEMGLIPLFPMYTDEVGDIHWLPQASGYTRTWDRDMFQQAIERLLSWESWNRRVRERRAQFEKKTHDFASRFSESDVQWMNKLREYEAQQEKSLEENAFAPNEPYALTKKALRGWERVYHSWMRLDSAASEEAYWQEVATCQTAMRGEFGDPAIYQFLAQKENHDIWRGYPERVIDFAELNHLQRELRRAKEDATFTLPDSVDHPLWVRYEAPGGTNIHGYDLVQDTKRNLTLILDKFILPDENGSWHEVKKVPFSLAKSKQFHRQVWLQEEQKQKKREVVFYDYSTNLPHLGTLAGAKLQWDRNFLNKRTQQQIEETGEIGKVFFNISVDVRPAVEVKNGRLQNGLGKALTVLTHPDGTKIVTGWKAEQLEKWVGESGRVSSLGLDSLSEGLRVMSIDLGQRTSATVSVFEITKEAPDNPYKFFYQLEGTEMFAVHQRSFLLALPGENPPQKIKQMREIRWKERNRIKQQVDQLSAILRLHKKVNEDERIQAIDKLLQKVASWQLNEEIATAWNQALSQLYSKAKENDLQWNQAIKNAHHQLEPVVGKQISLWRKDLSTGRQGIAGLSLWSIEELEATKKLLTRWSKRSREPGVVKRIERFETFAKQIQHHINQVKENRLKQLANLIVMTALGYKYDQEQKKWIEVYPACQVVLFENLRSYRFSFERSRRENKKLMEWSHRSIPKLVQMQGELFGLQVADVYAAYSSRYHGRTGAPGIRCHALTEADLRNETNIIHELIEAGFIKEEHRPYLQQGDLVPWSGGELFATLQKPYDNPRILTLHADINAAQNIQKRFWHPSMWFRVNCESVMEGEIVTYVPKNKTVHKKQGKTFRFVKVEGSDVYEWAKWSKNRNKNTFSSITERKPPSSMILFRDPSGTFFKEQEWVEQKTFWGKVQSMIQAYMKKTIVQRMEE

SEQ ID NO: 60 - protein, 1194 aa, Dsulfonatronum thiodismutans
MVLGRKDDTAELRRALWTTHEHVNLAVAEVERVLLRCRGRSYWTLDRRGDPVHVPESQVAEDALAMAREAQRRNGWPVVGEDEEILLALRYLYEQIVPSCLLDDLGKPLKGDAQKIGTNYAGPLFDSDTCRRDEGKDVACCGPFHEVAGKYLGALPEWATPISKQEFDGKDASHLRFKATGGDDAFFRVSIEKANAWYEDPANQDALKNKAYNKDDWKKEKDKGISSWAVKYIQKQLQLGQDPRTEVRRKLWLELGLLPLFIPVFDKTMVGNLWNRLAVRLALAHLLSWESWNHRAVQDQALARAKRDELAALFLGMEDGFAGLREYELRRNESIKQHAFEPVDRPYVVSGRALRSWTRVREEWLRHGDTQESRKNICNRLQDRLRGKFGDPDVFHWLAEDGQEALWKERDCVTSFSLLNDADGLLEKRKGYALMTFADARLHPRWAMYEAPGGSNLRTYQIRKTENGLWADVVLLSPRNESAAVEEKTFNVRLAPSGQLSNVSFDQIQKGSKMVGRCRYQSANQQFEGLLGGAEILFDRKRIANEQHGATDLASKPGHVWFKLTLDVRPQAPQGWLDGKGRPALPPEAKHFKTALSNKSKFADQVRPGLRVLSVDLGVRSFAACSVFELVRGGPDQGTYFPAADGRTVDDPEKLWAKHERSFKITLPGENPSRKEEIARRAAMEELRSLNGDIRRLKAILRLSVLQEDDPRTEHLRLFMEAIVDDPAKSALNAELFKGFGDDRFRSTPDLWKQHCHFFHDKAEKVVAERFSRWRTETRPKSSSWQDWRERRGYAGGKSYWAVTYLEAVRGLILRWNMRGRTYGEVNRQDKKQFGTVASALLHHINQLKEDRIKTGADMIIQAARGFVPRKNGAGWVQVHEPCRLILFEDLARYRFRTDRSRRENSRLMRWSHREIVNEVGMQGELYGLHVDTTEAGFSSRYLASSGAPGVRCRHLVEEDFHDGLPGMHLVGELDWLLPKDKDRTANEARRLLGGMVRPGMLVPWDGGELFATLNAASQLHVIHADINAAQNLQRRFWGRCGEAIRIVCNQLSVDGSTRYEMAKAPKARLLGALQQLKNGDAPFHLTSIPNSQKPENSYVMTPTNAGKKYRAGPGEKSSGEEDELALDIVEQAEELAQGRKTFFRDPSGVFFAPDRWLPSEIYWSRIRRRIWQVTLERNSSGRQERAEMDEMPY

SEQ ID NO: 61 - protein, 1300 aa, Francisella novicida
MSIYQEFVNKYSLSKTLRFELIPQGKTLENIKARGLILDDEKRAKDYKKAKQIIDKYHQFFIEEILSSVCISEDLLQNYSDVYFKLKKSDDDNLQKDFKSAKDTIKKQISEYIKDSEKFKNLFNQNLIDAKKGQESDLILWLKQSKDNGIELFKANSDITDIDEALEIIKSFKGWTTYFKGFHENRKNVYSSNDIPTSIIYRIVDDNLPKFLENKAKYESLKDKAPEAINYEQIKKDLAEELTFDIDYKTSEVNQRVFSLDEVFEIANFNNYLNQSGITKFNTIIGGKFVNGENTKRKGINEYINLYSQQINDKTLKKYKMSVLFKQILSDTESKSFVIDKLEDDSDVVTTMQSFYEQIAAFKTVEEKSIKETLSLLFDDLKAQKLDLSKIYFKNDKSLTDLSQQVFDDYSVIGTAVLEYITQQIAPKNLDNPSKKEQELIAKKTEKAKYLSLETIKLALEEFNKHRDIDKQCRFEEILANFAAIPMIFDEIAQNKDNLAQISIKYQNQGKKDLLQASAEDDVKAIKDLLDQTNNLLHKLKIFHISQSEDKANILDKDEHFYLVFEECYFELANIVPLYNKIRNYITQKPYSDEKFKLNFENSTLANGWDKNKEPDNTAILFIKDDKYYLGVMNKKNNKIFDDKAIKENKGEGYKKIVYKLLPGANKMLPKVFFSAKSIKFYNPSEDILRIRNHSTHTKNGSPQKGYEKFEFNIEDCRKFIDFYKQSISKHPEWKDFGFRFSDTQRYNSIDEFYREVENQGYKLTFENISESYIDSVVNQGKLYLFQIYNKDFSAYSKGRPNLHTLYWKALFDERNLQDVVYKLNGEAELFYRKQSIPKKITHPAKEAIANKNKDNPKKESVFEYDLIKDKRFTEDKFFFHCPITINFKSSGANKFNDEINLLLKEKANDVHILSIDRGERHLAYYTLVDGKGNIIKQDTFNIIGNDRMKTNYHDKLAAIEKDRDSARKDWKKINNIKEMKEGYLSQVVHEIAKLVIEYNAIVVFEDLNFGFKRGRFKVEKQVYQKLEKMLIEKLNYLVFKDNEFDKTGGVLRAYQLTAPFETFKKMGKQTGIIYYVPAGFTSKICPVTGFVNQLYPKYESVSKSQEFFSKFDKICYNLDKGYFEFSFDYKNFGDKAAKGKWTIASFGSRLINFRNSDKNHNWDTREVYPTKELEKLLKDYSIEYGHGECIKAAICGESDKKFFAKLTSVLNTILQMRNSKTGTELDYLISPVADVNGNFFDSRQAPKNMPQDADANGAYHIGLKGLMLLGRIKNNQEGKKLNLVIKNEEYFEFVQNRNN

SEQ ID NO: 62 - protein, 1082 aa, Geobacillus thermodenitrificans; identical to SEQ ID NO: 25

SEQ ID NO: 63 - protein, 887 aa, Natronobacterium gregoryi
MTVIDLDSTTTADELTSGHTYDISVTLTGVYDNTDEQHPRMSLAFEQDNGERRYITLWKNTTPKDVFTYDYATGSTYIFTNIDYEVKDGYENLTATYQTTVENATAQEVGTTDEDETFAGGEPLDHHLDDALNETPDDAETESDSGHVMTSFASRDQLPEWTLHTYTLTATDGAKTDTEYARRTLAYTVRQELYTDHDAAPVATDGLMLLTPEPLGETPLDLDCGVRVEADETRTLDYTTAKDRLLARELVEEGLKRSLWDDYLVRGIDEVLSKEPVLTCDEFDLHERYDLSVEVGHSGRAYLHINFRHRFVPKLTLADIDDDNIYPGLRVKTTYRPRRGHIVWGLRDECATDSLNTLGNQSVVAYHRNNQTPINTDLLDAIEAADRRVVETRRQGHGDDAVSFPQELLAVEPNTHQIKQFASDGFHQQARSKTRLSASRCSEKAQAFAERLDPVRLNGSTVEFSSEFFTGNNEQQLRLLYENGESVLTFRDGARGAHPDETFSKGIVNPPESFEVAVVLPEQQADTCKAQWDTMADLLNQAGAPPTRSETVQYDAFSSPESISLNVAGAIDPSEVDAAFVVLPPDQEGFADLASPTETYDELKKALANMGIYSQMAYFDRFRDAKIFYTRNVALGLLAAAGGVAFTTEHAMPGDADMFIGIDVSRSYPEDGASGQINIAATATAVYKDGTILGHSSTRPQLGEKLQSTDVRDIMKNAILGYQQVTGESPTHIVIHRDGFMNEDLDPATEFLNEQGVEYDIVEIRKQPQTRLLAVSDVQYDTPVKSIAAINQNEPRATVATFGAPEYLATRDGGGLPRPIQIERVAGETDIETLTRQVYLLSQSHIQVHNSTARLPITTAYADQASTHATKGYLVQTGAFESNVGFL

SEQ ID NO: 64 - protein, 1387 aa, Artificial Sequence
  Synthetic
DYKVYDVRKMIAKSEQEIGKATAKYFFYSNIMNFFKTEITLANGEIRKRPLIETNGETGEIVWDKGRDFATVRKVLSMPQVNIVKKTEVQTGGFSKESILPKRNSDKLIARKKDWDPKKYGGFDSPTVAYSVLVVAKVEKGKSKKLKSVKELLGITIMERSSFEKNPIDFLEAKGYKEVKKDLIIKLPKYSLFELENGRKRMLASAGELQKGNELALPSKYVNFLYLASHYEKLKGSPEDNEQKQLFVEQHKHYLDEIIEQISEFSKRVILADANLDKVLSAYNKHRDKPIREQAENIIHLFTLTNLGAPAAFKYFDTTIDRKRYTSTKEVLDATLIHQSITGLYETRIDLSQLGGDGGSGGSGGSGGSGGSGGSGGDKKYSIGLAIGTNSVGWAVITDEYKVPSKKFKVLGNTDRHSIKKNLIGALLFDSGETAEATRLKRTARRRYTRRKNRICYLQEIFSNEMAKVDDSFFHRLEESFLVEEDKKHERHPIFGNIVDEVAYHEKYPTIYHLRKKLVDSTDKADLRLIYLALAHMIKFRGHFLIEGDLNPDNSDVDKLFIQLVQTYNQLFEENPINASGVDAKAILSARLSKSRRLENLIAQLPGEKKNGLFGNLIALSLGLTPNFKSNFDLAEDAKLQLSKDTYDDDLDNLLAQIGDQYADLFLAAKNLSDAILLSDILRVNTEITKAPLSASMIKRYDEHHQDLTLLKALVRQQLPEKYKEIFFDQSKNGYAGYIDGGASQEEFYKFIKPILEKMDGTEELLVKLNREDLLRKQRTFDNGSIPHQIHLGELHAILRRQEDFYPFLKDNREKIEKILTFRIPYYVGPLARGNSRFAWMTRKSEETITPWNFEEVVDKGASAQSFIERMTNFDKNLPNEKVLPKHSLLYEYFTVYNELTKVKYVTEGMRKPAFLSGEQKKAIVDLLFKTNRKVTVKQLKEDYFKKIECFDSVEISGVEDRFNASLGTYHDLLKIIKDKDFLDNEENEDILEDIVLTLTLFEDREMIEERLKTYAHLFDDKVMKQLKRRRYTGWGRLSRKLINGIRDKQSGKTILDFLKSDGFANRNFMQLIHDDSLTFKEDIQKAQVSGQGDSLHEHIANLAGSPAIKKGILQTVKVVDELVKVMGRHKPENIVIEMARENQTTQKGQKNSRERMKRIEEGIKELGSQILKEHPVENTQLQNEKLYLYYLQNGRDMYVDQELDINRLSDYDVDHIVPQSFLKDDSIDNKVLTRSDKNRGKSDNVPSEEVVKKMKNYWRQLLNAKLITQRKFDNLTKAERGGLSELDKAGFIKRQLVETRQITKHVAQILDSRMNTKYDENDKLIREVKVITLKSKLVSDFRKDFQFYKVREINNYHHAHDAYLNAVVGTALIKKYPKLESEFVYG

SEQ ID NO: 65 - protein, 1388 aa, Artificial Sequence
  Synthetic
EIGKATAKYFFYSNIMNFFKTEITLANGEIRKRPLIETNGETGEIVWDKGRDFATVRKVLSMPQVNIVKKTEVQTGGFSKESILPKRNSDKLIARKKDWDPKKYGGFDSPTVAYSVLVVAKVEKGKSKKLKSVKELLGITIMERSSFEKNPIDFLEAKGYKEVKKDLIIKLPKYSLFELENGRKRMLASAGELQKGNELALPSKYVNFLYLASHYEKLKGSPEDNEQKQLFVEQHKHYLDEIIEQISEFSKRVILADANLDKVLSAYNKHRDKPIREQAENIIHLFTLTNLGAPAAFKYFDTTIDRKRYTSTKEVLDATLIHQSITGLYETRIDLSQLGGDGGSGGSGGSGGSGGSGGSGGMDKKYSIGLAIGTNSVGWAVITDEYKVPSKKFKVLGNTDRHSIKKNLIGALLFDSGETAEATRLKRTARRRYTRRKNRICYLQEIFSNEMAKVDDSFFHRLEESFLVEEDKKHERHPIFGNIVDEVAYHEKYPTIYHLRKKLVDSTDKADLRLIYLALAHMIKFRGHFLIEGDLNPDNSDVDKLFIQLVQTYNQLFEENPINASGVDAKAILSARLSKSRRLENLIAQLPGEKKNGLFGNLIALSLGLTPNFKSNFDLAEDAKLQLSKDTYDDDLDNLLAQIGDQYADLFLAAKNLSDAILLSDILRVNTEITKAPLSASMIKRYDEHHQDLTLLKALVRQQLPEKYKEIFFDQSKNGYAGYIDGGASQEEFYKFIKPILEKMDGTEELLVKLNREDLLRKQRTFDNGSIPHQIHLGELHAILRRQEDFYPFLKDNREKIEKILTFRIPYYVGPLARGNSRFAWMTRKSEETITPWNFEEVVDKGASAQSFIERMTNFDKNLPNEKVLPKHSLLYEYFTVYNELTKVKYVTEGMRKPAFLSGEQKKAIVDLLFKTNRKVTVKQLKEDYFKKIECFDSVEISGVEDRFNASLGTYHDLLKIIKDKDFLDNEENEDILEDIVLTLTLFEDREMIEERLKTYAHLFDDKVMKQLKRRRYTGWGRLSRKLINGIRDKQSGKTILDFLKSDGFANRNFMQLIHDDSLTFKEDIQKAQVSGQGDSLHEHIANLAGSPAIKKGILQTVKVVDELVKVMGRHKPENIVIEMARENQTTQKGQKNSRERMKRIEEGIKELGSQILKEHPVENTQLQNEKLYLYYLQNGRDMYVDQELDINRLSDYDVDHIVPQSFLKDDSIDNKVLTRSDKNRGKSDNVPSEEVVKKMKNYWRQLLNAKLITQRKFDNLTKAERGGLSELDKAGFIKRQLVETRQITKHVAQILDSRMNTKYDENDKLIREVKVITLKSKLVSDFRKDFQFYKVREINNYHHAHDAYLNAVVGTALIKKYPKLESEFVYGDYKVYDVRKMIAKSEQ

SEQ ID NO: 66 - protein, 1387 aa, Artificial Sequence
  Synthetic
NIMNFFKTEITLANGEIRKRPLIETNGETGEIVWDKGRDFATVRKVLSMPQVNIVKKTEVQTGGFSKESILPKRNSDKLIARKKDWDPKKYGGFDSPTVAYSVLVVAKVEKGKSKKLKSVKELLGITIMERSSFEKNPIDFLEAKGYKEVKKDLIIKLPKYSLFELENGRKRMLASAGELQKGNELALPSKYVNFLYLASHYEKLKGSPEDNEQKQLFVEQHKHYLDEIIEQISEFSKRVILADANLDKVLSAYNKHRDKPIREQAENIIHLFTLTNLGAPAAFKYFDTTIDRKRYTSTKEVLDATLIHQSITGLYETRIDLSQLGGDGGSGGSGGSGGSGGSGGSGGDKKYSIGLAIGTNSVGWAVITDEYKVPSKKFKVLGNTDRHSIKKNLIGALLFDSGETAEATRLKRTARRRYTRRKNRICYLQEIFSNEMAKVDDSFFHRLEESFLVEEDKKHERHPIFGNIVDEVAYHEKYPTIYHLRKKLVDSTDKADLRLIYLALAHMIKFRGHFLIEGDLNPDNSDVDKLFIQLVQTYNQLFEENPINASGVDAKAILSARLSKSRRLENLIAQLPGEKKNGLFGNLIALSLGLTPNFKSNFDLAEDAKLQLSKDTYDDDLDNLLAQIGDQYADLFLAAKNLSDAILLSDILRVNTEITKAPLSASMIKRYDEHHQDLTLLKALVRQQLPEKYKEIFFDQSKNGYAGYIDGGASQEEFYKFIKPILEKMDGTEELLVKLNREDLLRKQRTFDNGSIPHQIHLGELHAILRRQEDFYPFLKDNREKIEKILTFRIPYYVGPLARGNSRFAWMTRKSEETITPWNFEEVVDKGASAQSFIERMTNFDKNLPNEKVLPKHSLLYEYFTVYNELTKVKYVTEGMRKPAFLSGEQKKAIVDLLFKTNRKVTVKQLKEDYFKKIECFDSVEISGVEDRFNASLGTYHDLLKIIKDKDFLDNEENEDILEDIVLTLTLFEDREMIEERLKTYAHLFDDKVMKQLKRRRYTGWGRLSRKLINGIRDKQSGKTILDFLKSDGFANRNFMQLIHDDSLTFKEDIQKAQVSGQGDSLHEHIANLAGSPAIKKGILQTVKVVDELVKVMGRHKPENIVIEMARENQTTQKGQKNSRERMKRIEEGIKELGSQILKEHPVENTQLQNEKLYLYYLQNGRDMYVDQELDINRLSDYDVDHIVPQSFLKDDSIDNKVLTRSDKNRGKSDNVPSEEVVKKMKNYWRQLLNAKLITQRKFDNLTKAERGGLSELDKAGFIKRQLVETRQITKHVAQILDSRMNTKYDENDKLIREVKVITLKSKLVSDFRKDFQFYKVREINNYHHAHDAYLNAVVGTALIKKYPKLESEFVYGDYKVYDVRKMIAKSEQEIGKATAKYFFYS

SEQ ID NO: 67 - protein, 1388 aa, Artificial Sequence
  Synthetic
PEDNEQKQLFVEQHKHYLDEIIEQISEFSKRVILADANLDKVLSAYNKHRDKPIREQAENIIHLFTLTNLGAPAAFKYFDTTIDRKRYTSTKEVLDATLIHQSITGLYETRIDLSQLGGDGGSGGSGGSGGSGGSGGSGGMDKKYSIGLAIGTNSVGWAVITDEYKVPSKKFKVLGNTDRHSIKKNLIGALLFDSGETAEATRLKRTARRRYTRRKNRICYLQEIFSNEMAKVDDSFFHRLEESFLVEEDKKHERHPIFGNIVDEVAYHEKYPTIYHLRKKLVDSTDKADLRLIYLALAHMIKFRGHFLIEGDLNPDNSDVDKLFIQLVQTYNQLFEENPINASGVDAKAILSARLSKSRRLENLIAQLPGEKKNGLFGNLIALSLGLTPNFKSNFDLAEDAKLQLSKDTYDDDLDNLLAQIGDQYADLFLAAKNLSDAILLSDILRVNTEITKAPLSASMIKRYDEHHQDLTLLKALVRQQLPEKYKEIFFDQSKNGYAGYIDGGASQEEFYKFIKPILEKMDGTEELLVKLNREDLLRKQRTFDNGSIPHQIHLGELHAILRRQEDFYPFLKDNREKIEKILTFRIPYYVGPLARGNSRFAWMTRKSEETITPWNFEEVVDKGASAQSFIERMTNFDKNLPNEKVLPKHSLLYEYFTVYNELTKVKYVTEGMRKPAFLSGEQKKAIVDLLFKTNRKVTVKQLKEDYFKKIECFDSVEISGVEDRFNASLGTYHDLLKIIKDKDFLDNEENEDILEDIVLTLTLFEDREMIEERLKTYAHLFDDKVMKQLKRRRYTGWGRLSRKLINGIRDKQSGKTILDFLKSDGFANRNFMQLIHDDSLTFKEDIQKAQVSGQGDSLHEHIANLAGSPAIKKGILQTVKVVDELVKVMGRHKPENIVIEMARENQTTQKGQKNSRERMKRIEEGIKELGSQILKEHPVENTQLQNEKLYLYYLQNGRDMYVDQELDINRLSDYDVDHIVPQSFLKDDSIDNKVLTRSDKNRGKSDNVPSEEVVKKMKNYWRQLLNAKLITQRKFDNLTKAERGGLSELDKAGFIKRQLVETRQITKHVAQILDSRMNTKYDENDKLIREVKVITLKSKLVSDFRKDFQFYKVREINNYHHAHDAYLNAVVGTALIKKYPKLESEFVYGDYKVYDVRKMIAKSEQEIGKATAKYFFYSNIMNFFKTEITLANGEIRKRPLIETNGETGEIVWDKGRDFATVRKVLSMPQVNIVKKTEVQTGGFSKESILPKRNSDKLIARKKDWDPKKYGGFDSPTVAYSVLVVAKVEKGKSKKLKSVKELLGITIMERSSFEKNPIDFLEAKGYKEVKKDLIIKLPKYSLFELENGRKRMLASAGELQKGNELALPSKYVNFLYLASHYEKLKGS

SEQ ID NO: 68 - protein, 1387 aa, Artificial Sequence
  Synthetic
KPIREQAENIIHLFTLTNLGAPAAFKYFDTTIDRKRYTSTKEVLDATLIHQSITGLYETRIDLSQLGGDGGSGGSGGSGGSGGSGGSGGDKKYSIGLAIGTNSVGWAVITDEYKVPSKKFKVLGNTDRHSIKKNLIGALLFDSGETAEATRLKRTARRRYTRRKNRICYLQEIFSNEMAKVDDSFFHRLEESFLVEEDKKHERHPIFGNIVDEVAYHEKYPTIYHLRKKLVDSTDKADLRLIYLALAHMIKFRGHFLIEGDLNPDNSDVDKLFIQLVQTYNQLFEENPINASGVDAKAILSARLSKSRRLENLIAQLPGEKKNGLFGNLIALSLGLTPNFKSNFDLAEDAKLQLSKDTYDDDLDNLLAQIGDQYADLFLAAKNLSDAILLSDILRVNTEITKAPLSASMIKRYDEHHQDLTLLKALVRQQLPEKYKEIFFDQSKNGYAGYIDGGASQEEFYKFIKPILEKMDGTEELLVKLNREDLLRKQRTFDNGSIPHQIHLGELHAILRRQEDFYPFLKDNREKIEKILTFRIPYYVGPLARGNSRFAWMTRKSEETITPWNFEEVVDKGASAQSFIERMTNFDKNLPNEKVLPKHSLLYEYFTVYNELTKVKYVTEGMRKPAFLSGEQKKAIVDLLFKTNRKVTVKQLKEDYFKKIECFDSVEISGVEDRFNASLGTYHDLLKIIKDKDFLDNEENEDILEDIVLTLTLFEDREMIEERLKTYAHLFDDKVMKQLKRRRYTGWGRLSRKLINGIRDKQSGKTILDFLKSDGFANRNFMQLIHDDSLTFKEDIQKAQVSGQGDSLHEHIANLAGSPAIKKGILQTVKVVDELVKVMGRHKPENIVIEMARENQTTQKGQKNSRERMKRIEEGIKELGSQILKEHPVENTQLQNEKLYLYYLQNGRDMYVDQELDINRLSDYDVDHIVPQSFLKDDSIDNKVLTRSDKNRGKSDNVPSEEVVKKMKNYWRQLLNAKLITQRKFDNLTKAERGGLSELDKAGFIKRQLVETRQITKHVAQILDSRMNTKYDENDKLIREVKVITLKSKLVSDFRKDFQFYKVREINNYHHAHDAYLNAVVGTALIKKYPKLESEFVYGDYKVYDVRKMIAKSEQEIGKATAKYFFYSNIMNFFKTEITLANGEIRKRPLIETNGETGEIVWDKGRDFATVRKVLSMPQVNIVKKTEVQTGGFSKESILPKRNSDKLIARKKDWDPKKYGGFDSPTVAYSVLVVAKVEKGKSKKLKSVKELLGITIMERSSFEKNPIDFLEAKGYKEVKKDLIIKLPKYSLFELENGRKRMLASAGELQKGNELALPSKYVNFLYLASHYEKLKGSPEDNEQKQLFVEQHKHYLDEIIEQISEFSKRVILADANLDKVLSAYNKHRD

SEQ ID NO: 69 - protein, 357 aa, Artificial Sequence
  Synthetic
DYKVYDVRKMIAKSEQEIGKATAKYFFYSNIMNFFKTEITLANGEIRKRPLIETNGETGEIVWDKGRDFATVRKVLSMPQVNIVKKTEVQTGGFSKESILPKRNSDKLIARKKDWDPKKYGGFDSPTVAYSVLVVAKVEKGKSKKLKSVKELLGITIMERSSFEKNPIDFLEAKGYKEVKKDLIIKLPKYSLFELENGRKRMLASAGELQKGNELALPSKYVNFLYLASHYEKLKGSPEDNEQKQLFVEQHKHYLDEIIEQISEFSKRVILADANLDKVLSAYNKHRDKPIREQAENIIHLFTLTNLGAPAAFKYFDTTIDRKRYTSTKEVLDATLIHQSITGLYETRIDLSQLGGD

SEQ ID NO: 70 - protein, 341 aa, Artificial Sequence
  Synthetic
EIGKATAKYFFYSNIMNFFKTEITLANGEIRKRPLIETNGETGEIVWDKGRDFATVRKVLSMPQVNIVKKTEVQTGGFSKESILPKRNSDKLIARKKDWDPKKYGGFDSPTVAYSVLVVAKVEKGKSKKLKSVKELLGITIMERSSFEKNPIDFLEAKGYKEVKKDLIIKLPKYSLFELENGRKRMLASAGELQKGNELALPSKYVNFLYLASHYEKLKGSPEDNEQKQLFVEQHKHYLDEIIEQISEFSKRVILADANLDKVLSAYNKHRDKPIREQAENIIHLFTLTNLGAPAAFKYFDTTIDRKRYTSTKEVLDATLIHQSITGLYETRIDLSQLGGD

SEQ ID NO: 71 - protein, 328 aa, Artificial Sequence
  Synthetic
NIMNFFKTEITLANGEIRKRPLIETNGETGEIVWDKGRDFATVRKVLSMPQVNIVKKTEVQTGGFSKESILPKRNSDKLIARKKDWDPKKYGGFDSPTVAYSVLVVAKVEKGKSKKLKSVKELLGITIMERSSFEKNPIDFLEAKGYKEVKKDLIIKLPKYSLFELENGRKRMLASAGELQKGNELALPSKYVNFLYLASHYEKLKGSPEDNEQKQLFVEQHKHYLDEIIEQISEFSKRVILADANLDKVLSAYNKHRDKPIREQAENIIHLFTLTNLGAPAAFKYFDTTIDRKRYTSTKEVLDATLIHQSITGLYETRIDLSQLGGD

SEQ ID NO: 72 - protein, 120 aa, Artificial Sequence
  Synthetic
PEDNEQKQLFVEQHKHYLDEIIEQISEFSKRVILADANLDKVLSAYNKHRDKPIREQAENIIHLFTLTNLGAPAAFKYFDTTIDRKRYTSTKEVLDATLIHQSITGLYETRIDLSQLGGD

SEQ ID NO: 73 - protein, 69 aa, Artificial Sequence
  Synthetic
KPIREQAENIIHLFTLTNLGAPAAFKYFDTTIDRKRYTSTKEVLDATLIHQSITGLYETRIDLSQLGGD

SEQ ID NO: 74 - protein, 1367 aa, Artificial Sequence
  Synthetic
DKKYSIGLDIGTNSVGWAVITDEYKVPSKKFKVLGNTDRHSIKKNLIGALLFDSGETAEATRLKRTARRRYTRRKNRICYLQEIFSNEMAKVDDSFFHRLEESFLVEEDKKHERHPIFGNIVDEVAYHEKYPTIYHLRKKLVDSTDKADLRLIYLALAHMIKFRGHFLIEGDLNPDNSDVDKLFIQLVQTYNQLFEENPINASGVDAKAILSARLSKSRRLENLIAQLPGEKKNGLFGNLIALSLGLTPNFKSNFDLAEDAKLQLSKDTYDDDLDNLLAQIGDQYADLFLAAKNLSDAILLSDILRVNTEITKAPLSASMIKRYDEHHQDLTLLKALVRQQLPEKYKEIFFDQSKNGYAGYIDGGASQEEFYKFIKPILEKMDGTEELLVKLNREDLLRKQRTFDNGSIPHQIHLGELHAILRRQEDFYPFLKDNREKIEKILTFRIPYYVGPLARGNSRFAWMTRKSEETITPWNFEEVVDKGASAQSFIERMTNFDKNLPNEKVLPKHSLLYEYFTVYNELTKVKYVTEGMRKPAFLSGEQKKAIVDLLFKTNRKVTVKQLKEDYFKKIECFDSVEISGVEDRFNASLGTYHDLLKIIKDKDFLDNEENEDILEDIVLTLTLFEDREMIEERLKTYAHLFDDKVMKQLKRRRYTGWGRLSRKLINGIRDKQSGKTILDFLKSDGFANRNFMQLIHDDSLTFKEDIQKAQVSGQGDSLHEHIANLAGSPAIKKGILQTVKVVDELVKVMGRHKPENIVIEMARENQTTQKGQKNSRERMKRIEEGIKELGSQILKEHPVENTQLQNEKLYLYYLQNGRDMYVDQELDINRLSDYDVDAIVPQSFLKDDSIDNKVLTRSDKNRGKSDNVPSEEVVKKMKNYWRQLLNAKLITQRKFDNLTKAERGGLSELDKAGFIKRQLVETRQITKHVAQILDSRMNTKYDENDKLIREVKVITLKSKLVSDFRKDFQFYKVREINNYHHAHDAYLNAVVGTALIKKYPKLESEFVYGDYKVYDVRKMIAKSEQEIGKATAKYFFYSNIMNFFKTEITLANGEIRKRPLIETNGETGEIVWDKGRDFATVRKVLSMPQVNIVKKTEVQTGGFSKESILPKRNSDKLIARKKDWDPKKYGGFVSPTVAYSVLVVAKVEKGKSKKLKSVKELLGITIMERSSFEKNPIDFLEAKGYKEVKKDLIIKLPKYSLFELENGRKRMLASARELQKGNELALPSKYVNFLYLASHYEKLKGSPEDNEQKQLFVEQHKHYLDEIIEQISEFSKRVILADANLDKVLSAYNKHRDKPIREQAENIIHLFTLTNLGAPAAFKYFDTTIDRKQYRSTKEVLDATLIHQSITGLYETRIDLSQLGGD

SEQ ID NO: 75 - protein, 1367 aa, Artificial Sequence
  Synthetic
DKKYSIGLDIGTNSVGWAVITDEYKVPSKKFKVLGNTDRHSIKKNLIGALLFDSGETAEATRLKRTARRRYTRRKNRICYLQEIFSNEMAKVDDSFFHRLEESFLVEEDKKHERHPIFGNIVDEVAYHEKYPTIYHLRKKLVDSTDKADLRLIYLALAHMIKFRGHFLIEGDLNPDNSDVDKLFIQLVQTYNQLFEENPINASGVDAKAILSARLSKSRRLENLIAQLPGEKKNGLFGNLIALSLGLTPNFKSNFDLAEDAKLQLSKDTYDDDLDNLLAQIGDQYADLFLAAKNLSDAILLSDILRVNTEITKAPLSASMIKRYDEHHQDLTLLKALVRQQLPEKYKEIFFDQSKNGYAGYIDGGASQEEFYKFIKPILEKMDGTEELLVKLNREDLLRKQRTFDNGSIPHQIHLGELHAILRRQEDFYPFLKDNREKIEKILTFRIPYYVGPLARGNSRFAWMTRKSEETITPWNFEEVVDKGASAQSFIERMTNFDKNLPNEKVLPKHSLLYEYFTVYNELTKVKYVTEGMRKPAFLSGEQKKAIVDLLFKTNRKVTVKQLKEDYFKKIECFDSVEISGVEDRFNASLGTYHDLLKIIKDKDFLDNEENEDILEDIVLTLTLFEDREMIEERLKTYAHLFDDKVMKQLKRRRYTGWGRLSRKLINGIRDKQSGKTILDFLKSDGFANRNFMQLIHDDSLTFKEDIQKAQVSGQGDSLHEHIANLAGSPAIKKGILQTVKVVDELVKVMGRHKPENIVIEMARENQTTQKGQKNSRERMKRIEEGIKELGSQILKEHPVENTQLQNEKLYLYYLQNGRDMYVDQELDINRLSDYDVDAIVPQSFLKDDSIDNKVLTRSDKNRGKSDNVPSEEVVKKMKNYWRQLLNAKLITQRKFDNLTKAERGGLSELDKAGFIKRQLVETRQITKHVAQILDSRMNTKYDENDKLIREVKVITLKSKLVSDFRKDFQFYKVREINNYHHAHDAYLNAVVGTALIKKYPKLESEFVYGDYKVYDVRKMIAKSEQEIGKATAKYFFYSNIMNFFKTEITLANGEIRKRPLIETNGETGEIVWDKGRDFATVRKVLSMPQVNIVKKTEVQTGGFSKESILPKRNSDKLIARKKDWDPKKYGGFVSPTVAYSVLVVAKVEKGKSKKLKSVKELLGITIMERSSFEKNPIDFLEAKGYKEVKKDLIIKLPKYSLFELENGRKRMLASAGELQKGNELALPSKYVNFLYLASHYEKLKGSPEDNEQKQLFVEQHKHYLDEIIEQISEFSKRVILADANLDKVLSAYNKHRDKPIREQAENIIHLFTLTNLGAPAAFKYFDTTIDRKQYRSTKEVLDATLIHQSITGLYETRIDLSQLGGD

SEQ ID NO: 76 - protein, 1367 aa, Artificial Sequence
  Synthetic
DKKYSIGLDIGTNSVGWAVITDEYKVPSKKFKVLGNTDRHSIKKNLIGALLFDSGETAEATRLKRTARRRYTRRKNRICYLQEIFSNEMAKVDDSFFHRLEESFLVEEDKKHERHPIFGNIVDEVAYHEKYPTIYHLRKKLVDSTDKADLRLIYLALAHMIKFRGHFLIEGDLNPDNSDVDKLFIQLVQTYNQLFEENPINASGVDAKAILSARLSKSRRLENLIAQLPGEKKNGLFGNLIALSLGLTPNFKSNFDLAEDAKLQLSKDTYDDDLDNLLAQIGDQYADLFLAAKNLSDAILLSDILRVNTEITKAPLSASMIKRYDEHHQDLTLLKALVRQQLPEKYKEIFFDQSKNGYAGYIDGGASQEEFYKFIKPILEKMDGTEELLVKLNREDLLRKQRTFDNGSIPHQIHLGELHAILRRQEDFYPFLKDNREKIEKILTFRIPYYVGPLARGNSRFAWMTRKSEETITPWNFEEVVDKGASAQSFIERMTNFDKNLPNEKVLPKHSLLYEYFTVYNELTKVKYVTEGMRKPAFLSGEQKKAIVDLLFKTNRKVTVKQLKEDYFKKIECFDSVEISGVEDRFNASLGTYHDLLKIIKDKDFLDNEENEDILEDIVLTLTLFEDREMIEERLKTYAHLFDDKVMKQLKRRRYTGWGRLSRKLINGIRDKQSGKTILDFLKSDGFANRNFMQLIHDDSLTFKEDIQKAQVSGQGDSLHEHIANLAGSPAIKKGILQTVKVVDELVKVMGRHKPENIVIEMARENQTTQKGQKNSRERMKRIEEGIKELGSQILKEHPVENTQLQNEKLYLYYLQNGRDMYVDQELDINRLSDYDVDAIVPQSFLKDDSIDNKVLTRSDKNRGKSDNVPSEEVVKKMKNYWRQLLNAKLITQRKFDNLTKAERGGLSELDKAGFIKRQLVETRQITKHVAQILDSRMNTKYDENDKLIREVKVITLKSKLVSDFRKDFQFYKVREINNYHHAHDAYLNAVVGTALIKKYPKLESEFVYGDYKVYDVRKMIAKSEQEIGKATAKYFFYSNIMNFFKTEITLANGEIRKRPLIETNGETGEIVWDKGRDFATVRKVLSMPQVNIVKKTEVQTGGFSKESILPKRNSDKLIARKKDWDPKKYGGFVSPTVAYSVLVVAKVEKGKSKKLKSVKELLGITIMERSSFEKNPIDFLEAKGYKEVKKDLIIKLPKYSLFELENGRKRMLASARELQKGNELALPSKYVNFLYLASHYEKLKGSPEDNEQKQLFVEQHKHYLDEIIEQISEFSKRVILADANLDKVLSAYNKHRDKPIREQAENIIHLFTLTNLGAPAAFKYFDTTIDRKEYRSTKEVLDATLIHQSITGLYETRIDLSQLGGD

SEQ ID NO: 77 - protein, 1368 aa, Artificial Sequence
  Synthetic
MDKKYSIGLDIGTNSVGWAVITDEYKVPSKKFKVLGNTDRHSIKKNLIGALLFDSGETAEATRLKRTARRRYTRRKNRICYLQEIFSNEMAKVDDSFFHRLEESFLVEEDKKHERHPIFGNIVDEVAYHEKYPTIYHLRKKLVDSTDKADLRLIYLALAHMIKFRGHFLIEGDLNPDNSDVDKLFIQLVQTYNQLFEENPINASGVDAKAILSARLSKSRRLENLIAQLPGEKKNGLFGNLIALSLGLTPNFKSNFDLAEDAKLQLSKDTYDDDLDNLLAQIGDQYADLFLAAKNLSDAILLSDILRVNTEITKAPLSASMIKRYDEHHQDLTLLKALVRQQLPEKYKEIFFDQSKNGYAGYIDGGASQEEFYKFIKPILEKMDGTEELLVKLNREDLLRKQRTFDNGSIPHQIHLGELHAILRRQEDFYPFLKDNREKIEKILTFRIPYYVGPLARGNSRFAWMTRKSEETITPWNFEEVVDKGASAQSFIERMTNFDKNLPNEKVLPKHSLLYEYFTVYNELTKVKYVTEGMRKPAFLSGEQKKAIVDLLFKTNRKVTVKQLKEDYFKKIECFDSVEISGVEDRFNASLGTYHDLLKIIKDKDFLDNEENEDILEDIVLTLTLFEDREMIEERLKTYAHLFDDKVMKQLKRRRYTGWGRLSRKLINGIRDKQSGKTILDFLKSDGFANRNFMQLIHDDSLTFKEDIQKAQVSGQGDSLHEHIANLAGSPAIKKGILQTVKVVDELVKVMGRHKPENIVIEMARENQTTQKGQKNSRERMKRIEEGIKELGSQILKEHPVENTQLQNEKLYLYYLQNGRDMYVDQELDINRLSDYDVDHIVPQSFLKDDSIDNKVLTRSDKNRGKSDNVPSEEVVKKMKNYWRQLLNAKLITQRKFDNLTKAERGGLSELDKAGFIKRQLVETRQITKHVAQILDSRMNTKYDENDKLIREVKVITLKSKLVSDFRKDFQFYKVREINNYHHAHDAYLNAVVGTALIKKYPKLESEFVYGDYKVYDVRKMIAKSEQEIGKATAKYFFYSNIMNFFKTEITLANGEIRKRPLIETNGETGEIVWDKGRDFATVRKVLSMPQVNIVKKTEVQTGGFSKESIRPKRNSDKLIARKKDWDPKKYGGFVSPTVAYSVLVVAKVEKGKSKKLKSVKELLGITIMERSSFEKNPIDFLEAKGYKEVKKDLIIKLPKYSLFELENGRKRMLASARFLQKGNELALPSKYVNFLYLASHYEKLKGSPEDNEQKQLFVEQHKHYLDEIIEQISEFSKRVILADANLDKVLSAYNKHRDKPIREQAENIIHLFTLTNLGAPRAFKYFDTTIDRKVYRSTKEVLDATLIHQSITGLYETRIDLSQLGGD

SEQ ID NO: 78 - protein, 167 aa, Escherichia coli
MSEVEFSHEYWMRHALTLAKRAWDEREVPVGAVLVHNNRVIGEGWNRPIGRHDPTAHAEIMALRQGGLVMQNYRLIDATLYVTLEPCVMCAGAMIHSRIGRVVFGARDAKTGAAGSLMDVLHHPGMNHRVEITEGILADECAALLSDFFRMRRQEIKAQKKAQSSTD

SEQ ID NO: 79 - protein, 167 aa, Escherichia coli
MSEVEFSHEYWMRHALTLAKRARDEREVPVGAVLVLNNRVIGEGWNRAIGLHDPTAHAEIMALRQGGLVMQNYRLIDATLYVTFEPCVMCAGAMIHSRIGRVVFGVRNAKTGAAGSLMDVLHYPGMNHRVEITEGILADECAALLCYFFRMPRQVFNAQKKAQSSTD

SEQ ID NO: 80 - protein, 167 aa, Escherichia coli
MSEVEFSHEYWMRHALTLAKRARDEREVPVGAVLVLNNRVIGEGWNRAIGLHDPTAHAEIMALRQGGLVMQNYRLIDATLYVTFEPCVMCAGAMIHSRIGRVVFGWRNAKTGAAGSLMDVLHYPGMNHRVEITEGILADECAALLCYFFRMPRQVFNAQKKAQSSTD

SEQ ID NO: 81 - protein, 160 aa, Staphylococcus aureus
MGSHMTNDIYFMTLAIEEAKKAAQLGEVPIGAIITKDDEVIARAHNLRETLQQPTAHAEHIAIERAAKVLGSWRLEGCTLYVTLEPCVMCAGTIVMSRIPRVVYGADDPKGGCSGSLMNLLQQSNFNHRAIVDKGVLKEACSTLLTTFFKNLRANKKSTN

SEQ ID NO: 82 - protein, 161 aa, Bacillus subtilis
MTQDELYMKEAIKEAKKAEEKGEVPIGAVLVINGEIIARAHNLRETEQRSIAHAEMLVIDEACKALGTWRLEGATLYVTLEPCPMCAGAVVLSRVEKVVFGAFDPKGGCSGTLMNLLQEERFNHQAEVVSGVLEEECGGMLSAFFRELRKKKKAARKNLSE

SEQ ID NO: 83 - protein, 183 aa, Salmonella typhimurium
MPPAFITGVTSLSDVELDHEYWMRHALTLAKRAWDEREVPVGAVLVHNHRVIGEGWNRPIGRHDPTAHAEIMALRQGGLVLQNYRLLDTTLYVTLEPCVMCAGAMVHSRIGRVVFGARDAKTGAAGSLIDVLHHPGMNHRVEIIEGVLRDECATLLSDFFRMRRQEIKALKKADRAEGAGPAV

SEQ ID NO: 84 - protein, 164 aa, Shewanella putrefaciens
MDEYWMQVAMQMAEKAEAAGEVPVGAVLVKDGQQIATGYNLSISQHDPTAHAEILCLRSAGKKLENYRLLDATLYITLEPCAMCAGAMVHSRIARVVYGARDEKTGAAGTVVNLLQHPAFNHQVEVTSGVLAEACSAQLSRFFKRRRDEKKALKLAQRAQQGIE

SEQ ID NO: 85 - protein, 173 aa, Haemophilus influenzae
MDAAKVRSEFDEKMMRYALELADKAEALGEIPVGAVLVDDARNIIGEGWNLSIVQSDPTAHAEIIALRNGAKNIQNYRLLNSTLYVTLEPCTMCAGAILHSRIKRLVFGASDYKTGAIGSRFHFFDDYKMNHTLEITSGVLAEECSQKLSTFFQKRREEKKIEKALLKSLSDK

SEQ ID NO: 86 - protein, 161 aa, Caulobacter crescentus
MRTDESEDQDHRMMRLALDAARAAAEAGETPVGAVILDPSTGEVIATAGNGPIAAHDPTAHAEIAAMRAAAAKLGNYRLTDLTLVVTLEPCAMCAGAISHARIGRVVFGADDPKGGAVVHGPKFFAQPTCHWRPEVTGGVLADESADLLRGFFRARRKAKI

SEQ ID NO: 87 - protein, 178 aa, Geobacter sulfurreducens
MSSLKKTPIRDDAYWMGKAIREAAKAAARDEVPIGAVIVRDGAVIGRGHNLREGSNDPSAHAEMIAIRQAARRSANWRLTGATLYVTLEPCLMCMGAIILARLERVVFGCYDPKGAAGSLYDLSADPRLNHQVRLSPGVCQEECGTMLSDFFRDLRRRKKAKATPALFIDERKVPPEP

SEQ ID NO: 88 - protein, 167 aa, Escherichia coli; identical to SEQ ID NO: 78

SEQ ID NO: 89 - protein, 178 aa, Escherichia coli
MRRAFITGVFFLSEVEFSHEYWMRHALTLAKRAWDEREVPVGAVLVHNNRVIGEGWNRPIGRHDPTAHAEIMALRQGGLVMQNYRLIDATLYVTLEPCVMCAGAMIHSRIGRVVFGARDAKTGAAGSLMDVLHHPGMNHRVEITEGILADECAALLSDFFRMRRQEIKAQKKAQSSTD

SEQ ID NO: 90 - DNA, 498 bp, Escherichia coli
tctgaggtggagttttcccacgagtactggatgagacatgccctgaccctggccaagagggcacgggatgagagggaggtgcctgtgggagccgtgctggtgctgaacaatagagtgatcggcgagggctggaacagagccatcggcctgcacgacccaacagcccatgccgaaattatggccctgagacagggcggcctggtcatgcagaactacagactgattgacgccaccctgtacgtgacattcgagccttgcgtgatgtgcgccggcgccatgatccactctaggatcggccgcgtggtgtttggcgtgaggaactcaaaaagaggcgccgcaggctccctgatgaacgtgctgaactaccccggcatgaatcaccgcgtcgaaattaccgagggaatcctggcagatgaatgtgccgccctgctgtgcgatttctatcggatgcctagacaggtgttcaatgctcagaagaaggcccagagctccatcaac

SEQ ID NO: 91 - protein, 166 aa, Escherichia coli
SEVEFSHEYWMRHALTLAKRARDEREVPVGAVLVLNNRVIGEGWNRAIGLHDPTAHAEIMALRQGGLVMQNYRLIDATLYVTFEPCVMCAGAMIHSRIGRVVFGVRNSKRGAAGSLMNVLNYPGMNHRVEITEGILADECAALLCDFYRMPRQVFNAQKKAQSSIN

SEQ ID NO: 92 - protein, 198 aa, Homo Sapiens [sequence omitted]

SEQ ID NO: 93 - protein, 198 aa, Mus musculus
MDSLLMKQKKFLYHFKNVRWAKGRHETYLCYVVKRRDSATSCSLDFGHLRNKSGCHVELLFLRYISDWDLDPGRCYRVTWFTSWSPCYDCARHVAEFLRWNPNLSLRIFTARLYFCEDRKAEPEGLRRLHRAGVQIGIMTFKDYFYCWNTFVENRERTFKAWEGLHENSVRLTRQLRRILLPLYEVDDLRDAFRMLGF

SEQ ID NO: 94 - protein, 198 aa, Canis familiaris
MDSLLMKQRKFLYHFKNVRWAKGRHETYLCYVVKRRDSATSFSLDFGHLRNKSGCHVELLFLRYISDWDLDPGRCYRVTWFTSWSPCYDCARHVADFLRGYPNLSLRIFAARLYFCEDRKAEPEGLRRLHRAGVQIAIMTFKDYFYCWNTFVENREKTFKAWEGLHENSVRLSRQLRRILLPLYEVDDLRDAFRTLGL

SEQ ID NO: 95 - protein, 199 aa, Bos taurus
MDSLLKKQRQFLYQFKNVRWAKGRHETYLCYVVKRRDSPTSFSLDFGHLRNKAGCHVELLFLRYISDWDLDPGRCYRVTWFTSWSPCYDCARHVADFLRGYPNLSLRIFTARLYFCDKERKAEPEGLRRLHRAGVQIAIMTFKDYFYCWNTFVENHERTFKAWEGLHENSVRLSRQLRRILLPLYEVDDLRDAFRTLGL

SEQ ID NO: 96 - protein, 239 aa, Rattus norvegicus
MAVGSKPKAALVGPHWERERIWCFLCSTGLGTQQTGQTSRWLRPAATQDPVSPPRSLLMKQRKFLYHFKNVRWAKGRHETYLCYVVKRRDSATSFSLDFGYLRNKSGCHVELLFLRYISDWDLDPGRCYRVTWFTSWSPCYDCARHVADFLRGNPNLSLRIFTARLTGWGALPAGLMSPARPSDYFYCWNTFVENHERTFKAWEGLHENSVRLSRRLRRILLPLYEVDDLRDAFRTLGL

SEQ ID NO: 97 - protein, 429 aa, Mus musculus
MGPFCLGCSHRKCYSPIRNLISQETFKFHFKNLGYAKGRKDTFLCYEVTRKDCDSPVSLHHGVFKNKDNIHAEICFLYWFHDKVLKVLSPREEFKITWYMSWSPCFECAEQIVRFLATHHNLSLDIFSSRLYNVQDPETQQNLCRLVQEGAQVAAMDLYEFKKCWKKFVDNGGRRFRPWKRLLTNFRYQDSKLQEILRPCYIPVPSSSSSTLSNICLTKGLPETRFCVEGRRMDPLSEEEFYSQFYNQRVKHLCYYHRMKPYLCYQLEQFNGQAPLKGCLLSEKGKQHAEILFLDKIRSMELSQVTITCYLTWSPCPNCAWQLAAFKRDRPDLILHIYTSRLYFHWKRPFQKGLCSLWQSGILVDVMDLPQFTDCWTNFVNPKRPFWPWKGLEIISRRTQRRLRRIKESWGLQDLVNDFGNLQLGPPMS

SEQ ID NO: 98 - protein, 429 aa, Rattus norvegicus
MGPFCLGCSHRKCYSPIRNLISQETFKFHFKNLRYAIDRKDTFLCYEVTRKDCDSPVSLHHGVFKNKDNIHAEICFLYWFHDKVLKVLSPREEFKITWYMSWSPCFECAEQVLRFLATHHNLSLDIFSSRLYNIRDPENQQNLCRLVQEGAQVAAMDLYEFKKCWKKFVDNGGRRFRPWKKLLTNFRYQDSKLQEILRPCYIPVPSSSSSTLSNICLTKGLPETRFCVERRRVHLLSEEEFYSQFYNQRVKHLCYYHGVKPYLCYQLEQFNGQAPLKGCLLSEKGKQHAEILFLDKIRSMELSQVIITCYLTWSPCPNCAWQLAAFKRDRPDLILHIYTSRLYFHWKRPFQKGLCSLWQSGILVDVMDLPQFTDCWTNFVNPKRPFWPWKGLEIISRRTQRRLHRIKESWGLQDLVNDFGNLQLGPPMS

SEQ ID NO: 99 - protein, 370 aa, Macaca mulatta
MVEPMDPRTFVSNFNNRPILSGLNTVWLCCEVKTKDPSGPPLDAKIFQGKVYSKAKYHPEMRFLRWFHKWRQLHHDQEYKVTWYVSWSPCTRCANSVATFLAKDPKVTLTIFVARLYYFWKPDYQQALRILCQKRGGPHATMKIMNYNEFQDCWNKFVDGRGKPFKPRNNLPKHYTLLQATLGELLRHLMDPGTFTSNFNNKPWVSGQHETYLCYKVERLHNDTWVPLNQHRGFLRNQAPNIHGFPKGRHAELCFLDLIPFWKLDGQQYRVTCFTSWSPCFSCAQEMAKFISNNEHVSLCIFAARIYDDQGRYQEGLRALHRDGAKIAMMNYSEFEYCWDTFVDRQGRPFQPWDGLDEHSQALSGRLRAI

SEQ ID NO: 100 - protein, 384 aa, Pan troglodytes
MKPHFRNPVERMYQDTFSDNFYNRPILSHRNTVWLCYEVKTKGPSRPPLDAKIFRGQVYSKLKYHPEMRFFHWFSKWRKLHRDQEYEVTWYISWSPCTKCTRDVATFLAEDPKVTLTIFVARLYYFWDPDYQEALRSLCQKRDGPRATMKIMNYDEFQHCWSKFVYSQRELFEPWNNLPKYYILLHIMLGEILRHSMDPPTFTSNFNNELWVRGRHETYLCYEVERLHNDTWVLLNQRRGFLCNQAPHKHGFLEGRHAELCFLDVIPFWKLDLHQDYRVTCFTSWSPCFSCAQEMAKFISNNKHVSLCIFAARIYDDQGRCQEGLRTLAKAGAKISIMTYSEFKHCWDTFVDHQGCPFQPWDGLEEHSQALSGRLRAILQNQGN

SEQ ID NO: 101 - protein, 377 aa, Chlorocebus sabaeus
MNPQIRNMVEQMEPDIFVYYFNNRPILSGRNTVWLCYEVKTKDPSGPPLDANIFQGKLYPEAKDHPEMKFLHWFRKWRQLHRDQEYEVTWYVSWSPCTRCANSVATFLAEDPKVTLTIFVARLYYFWKPDYQQALRILCQERGGPHATMKIMNYNEFQHCWNEFVDGQGKPFKPRKNLPKHYTLLHATLGELLRHVMDPGTFTSNFNNKPWVSGQRETYLCYKVERSHNDTWVLLNQHRGFLRNQAPDRHGFPKGRHAELCFLDLIPFWKLDDQQYRVTCFTSWSPCFSCAQKMAKFISNNKHVSLCIFAARIYDDQGRCQEGLRTLHRDGAKIAVMNYSEFEYCWDTFVDRQGRPFQPWDGLDEHSQALSGRLRAI

SEQ ID NO: 102 - protein, 384 aa, Homo Sapiens
MKPHFRNTVERMYRDTFSYNFYNRPILSRRNTVWLCYEVKTKGPSRPPLDAKIFRGQVYSELKYHPEMRFFHWFSKWRKLHRDQEYEVTWYISWSPCTKCTRDMATFLAEDPKVTLTIFVARLYYFWDPDYQEALRSLCQKRDGPRATMKIMNYDEFQHCWSKFVYSQRELFEPWNNLPKYYILLHIMLGEILRHSMDPPTFTFNFNNEPWVRGRHETYLCYEVERMHNDTWVLLNQRRGFLCNQAPHKHGFLEGRHAELCFLDVIPFWKLDLDQDYRVTCFTSWSPCFSCAQEMAKFISKNKHVSLCIFTARIYDDQGRCQEGLRTLAEAGAKISIMTYSEFKHCWDTFVDHQGCPFQPWDGLDEHSQDLSGRLRAILQNQEN

SEQ ID NO: 103 - protein, 373 aa, Homo Sapiens
MKPHFRNTVERMYRDTFSYNFYNRPILSRRNTVWLCYEVKTKGPSRPRLDAKIFRGQVYSQPEHHAEMCFLSWFCGNQLPAYKCFQITWFVSWTPCPDCVAKLAEFLAEHPNVTLTISAARLYYYWERDYRRALCRLSQAGARVKIMDDEEFAYCWENFVYSEGQPFMPWYKFDDNYAFLHRTLKEILRNPMEAMYPHIFYFHFKNLRKAYGRNESWLCFTMEVVKHHSPVSWKRGVFRNQVDPETHCHAERCFLSWFCDDILSPNTNYEVTWYTSWSPCPECAGEVAEFLARHSNVNLTIFTARLYYFWDTDYQEGLRSLSQEGASVEIMGYKDFKYCWENFVYNDDEPFKPWKGLKYNFLFLDSKLQEILE

SEQ ID NO: 104 - protein, 382 aa, Homo Sapiens
MNPQIRNPMERMYRDTFYDNFENEPILYGRSYTWLCYEVKIKRGRSNLLWDTGVFRGQVYFKPQYHAEMCFLSWFCGNQLPAYKCFQITWFVSWTPCPDCVAKLAEFLSEHPNVTLTISAARLYYYWERDYRRALCRLSQAGARVTIMDYEEFAYCWENFVYNEGQQFMPWYKFDENYAFLHRTLKEILRYLMDPDTFTFNFNNDPLVLRRRQTYLCYEVERLDNGTWVLMDQHMGFLCNEAKNLLCGFYGRHAELRFLDLVPSLQLDPAQIYRVTWFISWSPCFSWGCAGEVRAFLQENTHVRLRIFAARIYDYDPLYKEALQMLRDAGAQVSIMTYDEFEYCWDTFVYRQGCPFQPWDGLEEHSQALSGRLRAILQNQGN

SEQ ID NO: 105 - protein, 396 aa, Rattus norvegicus
MQPQGLGPNAGMGPVCLGCSHRRPYSPIRNPLKKLYQQTFYFHFKNVRYAWGRKNNFLCYEVNGMDCALPVPLRQGVFRKQGHIHAELCFIYWFHDKVLRVLSPMEEFKVTWYMSWSPCSKCAEQVARFLAAHRNLSLAIFSSRLYYYLRNPNYQQKLCRLIQEGVHVAAMDLPEFKKCWNKFVDNDGQPFRPWMRLRINFSFYDCKLQEIFSRMNLLREDVFYLQFNNSHRVKPVQNRYYRRKSYLCYQLERANGQEPLKGYLLYKKGEQHVEILFLEKMRSMELSQVRITCYLTWSPCPNCARQLAAFKKDHPDLILRIYTSRLYFYWRKKFQKGLCTLWRSGIHVDVMDLPQFADCWTNFVNPQRPFRPWNELEKNSWRIQRRLRRIKESWGL

SEQ ID NO: 106 - protein, 227 aa, Bos taurus
DGWEVAFRSGTVLKAGVLGVSMTEGWAGSGHPGQGACVWTPGTRNTMNLLREVLFKQQFGNQPRVPAPYYRRKTYLCYQLKQRNDLTLDRGCFRNKKQRHAEIRFIDKINSLDLNPSQSYKIICYITWSPCPNCANELVNFITRNNHLKLEIFASRLYFHWIKSFKMGLQDLQNAGISVAVMTHTEFEDCWEQFVDNQSRPFQPWDKLEQYSASIRRRLQRILTAPI

SEQ ID NO: 107 - protein, 490 aa, Pan troglodytes
MNPQIRNPMEWMYQRTFYYNFENEPILYGRSYTWLCYEVKIRRGHSNLLWDTGVFRGQMYSQPEHHAEMCFLSWFCGNQLSAYKCFQITWFVSWTPCPDCVAKLAKFLAEHPNVTLTISAARLYYYWERDYRRALCRLSQAGARVKIMDDEEFAYCWENFVYNEGQPFMPWYKFDDNYAFLHRTLKEIIRHLMDPDTFTFNFNNDPLVLRRHQTYLCYEVERLDNGTWVLMDQHMGFLCNEAKNLLCGFYGRHAELRFLDLVPSLQLDPAQIYRVTWFISWSPCFSWGCAGQVRAFLQENTHVRLRIFAARIYDYDPLYKEALQMLRDAGAQVSIMTYDEFEYCWDTFVYRQGCPFQPWDGLEEHSQALSGRLRAILQVRASSLCMVPHRPPPPPQSPGPCLPLCSEPPLGSLLPTGRPAPSLPFLLTASFSFPPPASLPPLPSLSLSPGHLPVPSFHSLTSCSIQPPCSSRIRETEGWASVSKEGRDLG

SEQ ID NO: 108 - protein, 190 aa, Homo Sapiens
MNPQIRNPMKAMYPGTFYFQFKNLWEANDRNETWLCFTVEGIKRRSVVSWKTGVFRNQVDSETHCHAERCFLSWFCDDILSPNTKYQVTWYTSWSPCPDCAGEVAEFLARHSNVNLTIFTARLYYFQYPCYQEGLRSLSQEGVAVEIMDYEDFKYCWENFVYNDNEPFKPWKGLKTNFRLLKRRLRESLQ

SEQ ID NO: 109 - protein, 190 aa, Gorilla beringei
MNPQIRNPMKAMYPGTFYFQFKNLWEANDRNETWLCFTVEGIKRRSVVSWKTGVFRNQVDSETHCHAERCFLSWFCDDILSPNTNYQVTWYTSWSPCPECAGEVAEFLARHSNVNLTIFTARLYYFQDTDYQEGLRSLSQEGVAVKIMDYKDFKYCWENFVYNDDEPFKPWKGLKYNFRFLKRRLQEILE

SEQ ID NO: 110 - protein, 199 aa, Homo Sapiens
MEASPASGPRHLMDPHIFTSNFNNGIGRHKTYLCYEVERLDNGTSVKMDQHRGFLHNQAKNLLCGFYGRHAELRFLDLVPSLQLDPAQIYRVTWFISWSPCFSWGCAGEVRAFLQENTHVRLRIFAARIYDYDPLYKEALQMLRDAGAQVSIMTYDEFKHCWDTFVDHQGCPFQPWDGLDEHSQALSGRLRAILQNQGN

SEQ ID NO: 111 - protein, 202 aa, Macaca mulatta
MDGSPASRPRHLMDPNTFTFNFNNDLSVRGRHQTYLCYEVERLDNGTWVPMDERRGFLCNKAKNVPCGDYGCHVELRFLCEVPSWQLDPAQTYRVTWFISWSPCFRRGCAGQVRVFLQENKHVRLRIFAARIYDYDPLYQEALRTLRDAGAQVSIMTYEEFKHCWDTFVDRQGRPFQPWDGLDEHSQALSGRLRAILQNQGN

SEQ ID NO: 112 - protein, 185 aa, Bos taurus
MDEYTFTENFNNQGWPSKTYLCYEMERLDGDATIPLDEYKGFVRNKGLDQPEKPCHAELYFLGKIHSWNLDRNQHYRLTCFISWSPCYDCAQKLTTFLKENHHISLHILASRIYTHNRFGCHQSGLCELQAAGARITIMTFEDFKHCWETFVDHKGKPFQPWEGLNVKSQALCTELQAILKTQQN

SEQ ID NO: 113 - protein, 200 aa, Homo Sapiens
MALLTAETFRLQFNNKRRLRRPYYPRKALLCYQLTPQNGSTPTRGYFENKKKCHAEICFINEIKSMGLDETQCYQVTCYLTWSPCSSCAWELVDFIKAHDHLNLGIFASRLYYHWCKPQQKGLRLLCGSQVPVEVMGFPKFADCWENFVDHEKPLSFNPYKMLEELDKNSRAIKRRLERIKIPGVRAQGRYMDILCDAEV

SEQ ID NO: 114 - protein, 210 aa, Macaca mulatta
MALLTAKTFSLQFNNKRRVNKPYYPRKALLCYQLTPQNGSTPTRGHLKNKKKDHAEIRFINKIKSMGLDETQCYQVTCYLTWSPCPSCAGELVDFIKAHRHLNLRIFASRLYYHWRPNYQEGLLLLCGSQVPVEVMGLPEFTDCWENFVDHKEPPSFNPSEKLEELDKNSQAIKRRLERIKSRSVDVLENGLRSLQLGPVTPSSSIRNSR

SEQ ID NO: 115 - protein, 386 aa, Homo Sapiens
MNPQIRNPMERMYRDTFYDNFENEPILYGRSYTWLCYEVKIKRGRSNLLWDTGVFRGPVLPKRQSNHRQEVYFRFENHAEMCFLSWFCGNRLPANRRFQITWFVSWNPCLPCVVKVTKFLAEHPNVTLTISAARLYYYRDRDWRWVLLRLHKAGARVKIMDYEDFAYCWENFVCNEGQPFMPWYKFDDNYASLHRTLKEILRNPMEAMYPHIFYFHFKNLLKACGRNESWLCFTMEVTKHHSAVFRKRGVFRNQVDPETHCHAERCFLSWFCDDILSPNTNYEVTWYTSWSPCPECAGEVAEFLARHSNVNLTIFTARLCYFWDTDYQEGLCSLSQEGASVKIMGYKDFVSCWKNFVYSDDEPFKPWKGLQTNFRLLKRRLREILQ

SEQ ID NO: 116 - protein, 236 aa, Homo Sapiens
MTSEKGPSTGDPTLRRRIEPWEFDVFYDPRELRKEACLLYEIKWGMSRKIWRSSGKNTTNHVEVNFIKKFTSERDFHPSMSCSITWFLSWSPCWECSQAIREFLSRHPGVTLVIYVARLFWHMDQQNRQGLRDLVNSGVTIQIMRASEYYHCWRNFVNYPPGDEAHWPQYPPLWMMLYALELHCIILSLPPCLKISRRWQNHLTFFRLHLQNCHYQTIPPHILLATGLIHPSVAWR

SEQ ID NO: 117 - protein, 229 aa, Mus musculus
MSSETGPVAVDPTLRRRIEPHEFEVFFDPRELRKETCLLYEINWGGRHSVWRHTSQNTSNHVEVNFLEKFTTERYFRPNTRCSITWFLSWSPCGECSRAITEFLSRHPYVTLFIYIARLYHHTDQRNRQGLRDLISSGVTIQIMTEQEYCYCWRNFVNYPPSNEAYWPRYPHLWVKLYVLELYCIILGLPPCLKILRRKQPQLTFFTITLQTCHYQRIPPHLLWATGLK

SEQ ID NO: 118 - protein, 229 aa, Rattus norvegicus [sequence omitted]

SEQ ID NO: 119 - protein, 224 aa, Homo Sapiens
MAQKEEAAVATEAASQNGEDLENLDDPEKLKELIELPPFEIVTGERLPANFFKFQFRNVEYSSGRNKTFLCYVVEAQGKGGQVQASRGYLEDEHAAAHAEEAFFNTILPAFDPALRYNVTWYVSSSPCAACADRIIKTLSKTKNLRLLILVGRLFMWEEPEIQAALKKLKEAGCKLRIMKPQDFEYVWQNFVEQEEGESKAFQPWEDIQENFLYYEEKLADILK

SEQ ID NO: 120 - protein, 224 aa, Mus musculus
MAQKEEAAEAAAPASQNGDDLENLEDPEKLKELIDLPPFEIVTGVRLPVNFFKFQFRNVEYSSGRNKTFLCYVVEVQSKGGQAQATQGYLEDEHAGAHAEEAFFNTILPAFDPALKYNVTWYVSSSPCAACADRILKTLSKTKNLRLLILVSRLFMWEEPEVQAALKKLKEAGCKLRIMKPQDFEYIWQNFVEQEEGESKAFEPWEDIQENFLYYEEKLADILK

SEQ ID NO: 121 - protein, 224 aa, Rattus norvegicus
MAQKEEAAEAAAPASQNGDDLENLEDPEKLKELIDLPPFEIVTGVRLPVNFFKFQFRNVEYSSGRNKTFLCYVVEAQSKGGQVQATQGYLEDEHAGAHAEEAFFNTILPAFDPALKYNVTWYVSSSPCAACADRILKTLSKTKNLRLLILVSRLFMWEEPEVQAALKKLKEAGCKLRIMKPQDFEYLWQNFVEQEEGESKAFEPWEDIQENFLYYEEKLADILK

SEQ ID NO: 122 - protein, 224 aa, Bos taurus
MAQKEEAAAAAEPASQNGEEVENLEDPEKLKELIELPPFEIVTGERLPAHYFKFQFRNVEYSSGRNKTFLCYVVEAQSKGGQVQASRGYLEDEHATNHAEEAFFNSIMPTFDPALRYMVTWYVSSSPCAACADRIVKTLNKTKNLRLLILVGRLFMWEEPEIQAALRKLKEAGCRLRIMKPQDFEYIWQNFVEQEEGESKAFEPWEDIQENFLYYEEKLADILK

SEQ ID NO: 123 - protein, 208 aa, Petromyzon marinus
MTDAEYVRIHEKLDIYTFKKQFFNNKKSVSHRCYVLFELKRRGERRACFWGYAVNKPQSGTERGIHAEIFSIRKVEEYLRDNPGQFTINWYSSWSPCADCAEKILEWYNQELRGNGHTLKIWACKLYYEKNARNQIGLWNLRDNGVGLNVMVSEHYQCCRKIFIQSSHNQLNENRWLEKTLKRAEKRRSELSIMIQVKILHTTKSPAV

SEQ ID NO: 124 - protein, 384 aa, Homo Sapiens
MKPHFRNTVERMYRDTFSYNFYNRPILSRRNTVWLCYEVKTKGPSRPPLDAKIFRGQVYSELKYHPEMRFFHWFSKWRKLHRDQEYEVTWYISWSPCTKCTRDMATFLAEDPKVTLTIFVARLYYFWDPDYQEALRSLCQKRDGPRATMKIMNYDEFQHCWSKFVYSQRELFEPWNNLPKYYILLHIMLGEILRHSMDPPTFTFNFNNEPWVRGRHETYLCYEVERMHNDTWVLLNQRRGFLCNQAPHKHGFLEGRHAELCFLDVIPFWKLDLDQDYRVTCFTSWSPCFSCAQEMAKFISKNKHVSLCIFTARIYRRQGRCQEGLRTLAEAGAKISIMTYSEFKHCWDTFVDHQGCPFQPWDGLDEHSQDLSGRLRAILQNQEN

SEQ ID NO: 125 - protein, 184 aa, Homo Sapiens
MDPPTFTFNFNNEPWVRGRHETYLCYEVERMHNDTWVLLNQRRGFLCNQAPHKHGFLEGRHAELCFLDVIPFWKLDLDQDYRVTCFTSWSPCFSCAQEMAKFISKNKHVSLCIFTARIYDDQGRCQEGLRTLAEAGAKISIMTYSEFKHCWDTFVDHQGCPFQPWDGLDEHSQDLSGRLRAILQ

SEQ ID NO: 126 - protein, 184 aa, Homo Sapiens
MDPPTFTFNFNNEPWVRGRHETYLCYEVERMHNDTWVLLNQRRGFLCNQAPHKHGFLEGRHAELCFLDVIPFWKLDLDQDYRVTCFTSWSPCFSCAQEMAKFISKNKHVSLCIFTARIYRRQGRCQEGLRTLAEAGAKISIMTYSEFKHCWDTFVDHQGCPFQPWDGLDEHSQDLSGRLRAILQ

SEQ ID NO: 127 - protein, 162 aa, Artificial Sequence
  Synthetic
MFERNYDPRELRKETYLLYEIKWGKSGKLWRHWCQNNRTQHAEVYFLENIFNARRFNPSTHCSITWYLSWSPCAECSQKIVDFLKEHPNVNLEIYVARLYYHEDERNRQGLRDLVNSGVTIRIMDLPDYNYCWKTFVSDQGGDEDYWPGHFAPWIKQYSLKL

SEQ ID NO: 128 - protein, 162 aa, Artificial Sequence
  Synthetic
MFERNYDPRELRKETYLLYEIKWGKSGKLWRHWCQNNRTQHAEVYFLENIFNARRFNPSTHCSITWYLSWSPCAECSQKIVDFLKEHPNVNLEIYVARLYYPENERNRQGLRDLVNSGVTIRIMDLPDYNYCWKTFVSDQGGDEDYWPGHFAPWIKQYSLKL

SEQ ID NO: 129 - protein, 229 aa, Rattus norvegicus [sequence omitted]

SEQ ID NO: 130 - protein, 229 aa, Artificial Sequence
  Synthetic
MSSKTGPVAVDPTLRRRIEPHEFEVFFDPRELRKETCLLYEINWGGRHSIWRHTSQNTNKHVEVNFIEKFTTERYFCPNTRCSITWFLSWSPCGECSRAITEFLSRYPNVTLFIYIARLYHLANPRNRQGLRDLISSGVTIQIMTEQESGYCWHNFVNYSPSNESHWPRYPHLWVRLYVLELYCIILGLPPCLNILRRKQSQLTSFTIALQSCHYQRLPPHILWATGLK

SEQ ID NO: 131 - protein, 208 aa, Petromyzon marinus; identical to SEQ ID NO: 123

SEQ ID NO: 132 - protein, 208 aa, Artificial Sequence
  Synthetic
MTDAEYVRIHEKLDIYTFKKQFSNNKKSVSHRCYVLFELKRRGERRACFWGYAVNKPQSGTERGIHAEIFSIRKVEEYLRDNPGQFTINWYSSWSPCADCAEKILEWYNQELRGNGHTLKIWVCKLYYEKNARNQIGLWNLRDNGVGLNVMVSEHYQCCRKIFIQSSHNQLNENRWLEKTLKRAEKRRSELSIMFQVKILHTTKSPAV

SEQ ID NO: 133 - protein, 229 aa, Artificial Sequence
  Synthetic
MSSETGPVAVDPTLRRRIEPHEFEVFFDPRELRKETCLLYEIKWGTSHKIWRHSSKNTTKHVEVNFIEKFTSERHFCPSTSCSITWFLSWSPCGECSKAITEFLSQHPNVTLVIYVARLYHHMDQQNRQGLRDLVNSGVTIQIMTAPEYDYCWRNFVNYPPGKEAHWPRYPPLWMKLYALELHAGILGLPPCLNILRRKQPQLTFFTIALQSCHYQRLPPHILWATGLK

SEQ ID NO: 134 - protein, 229 aa, Artificial Sequence
  Synthetic
MSSKTGPVAVDPTLRRRIEPHEFEVFFDPRELRKETCLLYEIKWGTSHKIWRHSSKNTTKHVEVNFIEKFTSERHFCPSTSCSITWFLSWSPCGECSKAITEFLSQHPNVTLVIYVARLYHLMNQQNRQGLRDLVNSGVTIQIMTAPEYDYCWHNFVNYPPGKESHWPRYPPLWMKLYALELHAGILGLPPCLNILRRKQSQLTSFTIALQSCHYQRLPPHILWATGLK

SEQ ID NO: 135 - protein, 1 aa, Artificial Sequence
  Synthetic
  REPEAT (1)..(1)
G

SEQ ID NO: 136 - protein, 2 aa, Artificial Sequence
  Synthetic
  REPEAT (1)..(2)
  misc_feature (1)..(1): Xaa can be any naturally occurring amino acid
XP

SEQ ID NO: 137 - protein, 3 aa, Artificial Sequence
  Synthetic
  REPEAT (1)..(3)
GGS

SEQ ID NO: 138 - protein, 4 aa, Artificial Sequence
  Synthetic
SGGS

SEQ ID NO: 139 - protein, 4 aa, Artificial Sequence
  Synthetic
  REPEAT (1)..(4)
SGGS

SEQ ID NO: 140 - protein, 4 aa, Artificial Sequence
  Synthetic
  REPEAT (1)..(4)
GGGS

SEQ ID NO: 141 - protein, 5 aa, Artificial Sequence
  Synthetic
  REPEAT (1)..(5)
GGGGS

SEQ ID NO: 142 - protein, 5 aa, Artificial Sequence
  Synthetic
  REPEAT (1)..(5)
EAAAK

SEQ ID NO: 143 - protein, 16 aa, Artificial Sequence
  Synthetic
SGSETPGTSESATPES

SEQ ID NO: 144 - protein, 32 aa, Artificial Sequence
  Synthetic
SGGSSGGSSGSETPGTSESATPESSGGSSGGS

SEQ ID NO: 145 - protein, 24 aa, Artificial Sequence
  Synthetic
  REPEAT (1)..(4)
  REPEAT (21)..(24)
SGGSSGSETPGTSESATPESSGGS

SEQ ID NO: 146 - protein, 24 aa, Artificial Sequence
  Synthetic
SGGSSGGSSGSETPGTSESATPES

SEQ ID NO: 147 - protein, 24 aa, Artificial Sequence
  Synthetic
SGGSSGSETPGTSESATPESSGGS

SEQ ID NO: 148 - protein, 40 aa, Artificial Sequence
  Synthetic
SGGSSGGSSGSETPGTSESATPESSGGSSGGSSGGSSGGS

SEQ ID NO: 149 - protein, 64 aa, Artificial Sequence
  Synthetic
SGGSSGGSSGSETPGTSESATPESSGGSSGGSSGGSSGGSSGSETPGTSESATPESSGGSSGGS

SEQ ID NO: 150 - protein, 92 aa, Artificial Sequence
  Synthetic
PGSPAGSPTSTEEGTSESATPESGPGTSTEPSEGSAPGSPAGSPTSTEEGTSTEPSEGSAPGTSTEPSEGSAPGTSESATPESGPGSEPATS

SEQ ID NO: 151 - protein, 104 aa, Artificial Sequence
  Synthetic
GGSGGSPGSPAGSPTSTEEGTSESATPESGPGTSTEPSEGSAPGSPAGSPTSTEEGTSTEPSEGSAPGTSTEPSEGSAPGTSESATPESGPGSEPATSGGSGGS

SEQ ID NO: 152 - protein, 7 aa, Artificial Sequence
  Synthetic
PKKKRKV

SEQ ID NO: 153 - protein, 8 aa, Artificial Sequence
  Synthetic
VSRKRPRP

SEQ ID NO: 154 - protein, 9 aa, Artificial Sequence
  Synthetic
KLKIKRPVK

SEQ ID NO: 155 - protein, 9 aa, Artificial Sequence
  Synthetic
PAAKRVKLD

SEQ ID NO: 156 - protein, 10 aa, Artificial Sequence
  Synthetic
EGAPPAKRAR

SEQ ID NO: 157 - protein, 12 aa, Artificial Sequence
  Synthetic
PPQPKKKPLDGE

SEQ ID NO: 158 - protein, 19 aa, Artificial Sequence
  Synthetic
MKRTADGSEFESPKKKRKV

SEQ ID NO: 159 - protein, 20 aa, Artificial Sequence
  Synthetic
AVKRPAATKKAGQAKKKKLD

SEQ ID NO: 160 - protein, 21 aa, Artificial Sequence
  Synthetic
SGGSKRTADGSEFEPKKKRKV

SEQ ID NO: 161 - protein, 25 aa, Artificial Sequence
  Synthetic
MSRRRKANPTKLSENAKKLAKEVEN

SEQ ID NO: 162 - protein, 30 aa, Artificial Sequence
  Synthetic
MDSLLMNRRKFLYQFKNVRWAKGRRETYLC

SEQ ID NO: 163 - protein, 84 aa, Artificial Sequence
  Synthetic
MTNLSDIIEKETGKQLVIQESILMLPEEVEEVIGNKPESDILVHTAYDESTDENVMLLTSDAPEYKPWALVIQDSNGENKIKML

SEQ ID NO: 164 - protein, 413 aa, Artificial Sequence
  Synthetic
CLAEGTRIFDPVTGTTHRIEDVVDGRKPIHVVAAAKDGTLLARPVVSWFDQGTRDVIGLRIAGGAIVWATPDHKVLTEYGWRAAGELRKGDRVAGPGGSGNSLALSLTADQMVSALLDAEPPILYSEYDPTSPFSEASMMGLLTNLADRELVHMINWAKRVPGFVDLTLHDQAHLLECAWLEILMIGLVWRSMEHPGKLLFAPNLLLDRNQGKCVEGMVEIFDMLLATSSRFRMMNLQGEEFVCLKSIILLNSGVYTFLSSTLKSLEEKDHIHRALDKITDTLIHLMAKAGLTLQQQHQRLAQLLLILSHIRHMSNKGMEHLYSMKYKNVVPLYDLLLEMLDAHRLHAGGSGASRVQAFADALDDKFLHDMLAEELRYSVIREVLPTRRARTFDLEVEELHTLVAEGVVVHNC

SEQ ID NO: 165 - protein, 413 aa, Artificial Sequence
  Synthetic
CLAEGTRIFDPVTGTTHRIEDVVDGRKPIHVVAVAKDGTLLARPVVSWFDQGTRDVIGLRIAGGAIVWATPDHKVLTEYGWRAAGELRKGDRVAGPGGSGNSLALSLTADQMVSALLDAEPPILYSEYDPTSPFSEASMMGLLTNLADRELVHMINWAKRVPGFVDLTLHDQAHLLECAWLEILMIGLVWRSMEHPGKLLFAPNLLLDRNQGKCVEGMVEIFDMLLATSSRFRMMNLQGEEFVCLKSIILLNSGVYTFLSSTLKSLEEKDHIHRALDKITDTLIHLMAKAGLTLQQQHQRLAQLLLILSHIRHMSNKGMEHLYSMKYTNVVPLYDLLLEMLDAHRLHAGGSGASRVQAFADALDDKFLHDMLAEELRYSVIREVLPTRRARTFDLEVEELHTLVAEGVVVHNC

SEQ ID NO: 166 - protein, 413 aa, Artificial Sequence
  Synthetic
CLAEGTRIFDPVTGTTHRIEDVVDGRKPIHVVAAAKDGTLLARPVVSWFDQGTRDVIGLRIAGGATVWATPDHKVLTEYGWRAAGELRKGDRVAGPGGSGNSLALSLTADQMVSALLDAEPPIPYSEYDPTSPFSEASMMGLLTNLADRELVHMINWAKRVPGFVDLTLHDQAHLLECAWLEILMIGLVWRSMEHPGKLLFAPNLLLDRNQGKCVEGMVEIFDMLLATSSRFRMMNLQGEEFVCLKSIILLNSGVYTFLSSTLKSLEEKDHIHRALDKITDTLIHLMAKAGLTLQQQHQRLAQLLLILSHIRHMSNKGMEHLYSMKYKNVVPLYDLLLEMLDAHRLHAGGSGASRVQAFADALDDKFLHDMLAEGLRYSVIREVLPTRRARTFDLEVEELHTLVAEGVVVHNC

SEQ ID NO: 167 - protein, 413 aa, Artificial Sequence
  Synthetic
CLAEGTRIFDPVTGTTHRIEDVVDGRKPIHVVAAAKDGTLLARPVVSWFDQGTRDVIGLRIAGGATVWATPDHKVLTEYGWRAAGELRKGDRVAGPGGSGNSLALSLTADQMVSALLDAEPPILYSEYDPTSPFSEASMMGLLTNLADRELVHMINWAKRVPGFVDLTLHDQAHLLECAWLEILMIGLVWRSMEHPGKLLFAPNLLLDRNQGKCVEGMVEIFDMLLATSSRFRMMNLQGEEFVCLKSIILLNSGVYTFLSSTLKSLEEKDHIHRALDKITDTLIHLMAKAGLTLQQQHQRLAQLLLILSHIRHMSNKGMEHLYSMKYKNVVPLYDLLLEMLDAHRLHAGGSGASRVQAFADALDDKFLHDMLAEELRYSVIREVLPTRRARTFDLEVEELHTLVAEGVVVHNC

SEQ ID NO: 168 - protein, 413 aa, Artificial Sequence
  Synthetic
CLAEGTRIFDPVTGTTHRIEDVVDGRKPIHVVAAAKDGTLLARPVVSWFDQGTRDVIGLRIAGGATVWATPDHKVLTEYGWRAAGELRKGDRVAGPGGSGNSLALSLTADQMVSALLDAEPPIPYSEYDPTSPFSEASMMGLLTNLADRELVHMINWAKRVPGFVDLTLHDQAHLLECAWLEILMIGLVWRSMEHPGKLLFAPNLLLDRNQGKCVEGMVEIFDMLLATSSRFRMMNLQGEEFVCLKSIILLNSGVYTFLSSTLKSLEEKDHIHRALDKITDTLIHLMAKAGLTLQQQHQRLAQLLLILSHIRHMSNKGMEHLYSMKYKNVVPLYDLLLEMLDAHRLHAGGSGASRVQAFADALDDKFLHDMLAEELRYSVIREVLPTRRARTFDLEVEELHTLVAEGVVVHNC

SEQ ID NO: 169 - protein, 413 aa, Artificial Sequence
  Synthetic
CLAEGTRIFDPVTGTTHRIEDVVDGRKPIHVVAAAKDGTLLARPVVSWFDQGTRDVIGLRIAGGATVWATPDHKVLTEYGWRAAGELRKGDRVAGPGGSGNSLALSLTADQMVSALLDAEPPILYSEYNPTSPFSEASMMGLLTNLADRELVHMINWAKRVPGFVDLTLHDQAHLLERAWLEILMIGLVWRSMEHPGKLLFAPNLLLDRNQGKCVEGMVEIFDMLLATSSRFRMMNLQGEEFVCLKSIILLNSGVYTFLSSTLKSLEEKDHIHRALDKITDTLIHLMAKAGLTLQQQHQRLAQLLLILSHIRHMSNKGMEHLYSMKYKNVVPLYDLLLEMLDAHRLHAGGSGASRVQAFADALDDKFLHDMLAEGLRYSVIREVLPTRRARTFDLEVEELHTLVAEGVVVHNC

SEQ ID NO: 170 - protein, 413 aa, Artificial Sequence
  Synthetic
CLAEGTRIFDPVTGTTHRIEDVVDGRKPIHVVAAAKDGTLLARPVVSWFDQGTRDVIGLRIAGGAIVWATPDHKVLTEYGWRAAGELRKGDRVAGPGGSGNSLALSLTADQMVSALLDAEPPILYSEYDPTSPFSEASMMGLLTNLADRELVHMINWAKRVPGFVDLTLHDQAHLLERAWLEILMIGLVWRSMEHPGKLLFAPNLLLDRNQGKCVEGMVEIFDMLLATSSRFRMMNLQGEEFVCLKSIILLNSGVYTFLSSTLKSLEEKDHIHRALDKITDTLIHLMAKAGLTLQQQHQRLAQLLLILSHIRHMSNKGMEHLYSMKYKNVVPLYDLLLEMLDAHRLHAGGSGASRVQAFADALDDKFLHDMLAEGLRYSVIREVLPTRRARTFDLEVEELHTLVAEGVVVHNC

SEQ ID NO: 171 - protein, 413 aa, Artificial Sequence
  Synthetic
CLAEGTRIFDPVTGTTHRIEDVVDGRKPIHVVAVAKDGTLLARPVVSWFDQGTRDVIGLRIAGGATVWATPDHKVLTEYGWRAAGELRKGDRVAGPGGSGNSLALSLTADQMVSALLDAEPPILYSEYDPTSPFSEASMMGLLTNLADRELVHMINWAKRVPGFVDLTLHDQAHLLERAWLEILMIGLVWRSMEHPGKLLFAPNLLLDRNQGKCVEGMVEIFDMLLATSSRFRMMNLQGEEFVCLKSIILLNSGVYTFLSSTLKSLEEKDHIHRALDKITDTLIHLMAKAGLTLQQQHQRLAQLLLILSHIRHMSNKGMEHLYSMKYKNVVPLYDLLLEMLDAHRLHAGGSGASRVQAFADALDDKFLHDMLAEELRYSVIREVLPTRRARTFDLEVEELHTLVAEGVVVHNC

SEQ ID NO: 172 - DNA, 33 bp, Artificial Sequence
  Synthetic
gccaacatgaggatcacccatgtctgcagggcc

SEQ ID NO: 173 - protein, 131 aa, Artificial Sequence
  Synthetic
GSASNFTQFVLVDNGGTGDVTVAPSNFANGVAEWISSNSRSQAYKVTCSVRQSSAQNRKYTIKVEVPKVATQTVGGEELPVAGWRSYLNMELTIPIFATNSDCELIVKAMQGLLKDGNPIPSAIAANSGIY

SEQ ID NO: 174 - protein, 1561 aa, Artificial Sequence
  Synthetic
MSEVEFSHEYWMRHALTLAKRAWDEREVPVGAVLVHNNRVIGEGWNRPIGRHDPTAHAEIMALRQGGLVMQNYRLIDATLYVTLEPCVMCAGAMIHSRIGRVVFGARDAKTGAAGSLMDVLHHPGMNHRVEITEGILADECAALLSDFFRMRRQEIKAQKKAQSSTDSGSETPGTSESATPESDKKYSIGLAIGTNSVGWAVITDEYKVPSKKFKVLGNTDRHSIKKNLIGALLFDSGETAEATRLKRTARRRYTRRKNRICYLQEIFSNEMAKVDDSFFHRLEESFLVEEDKKHERHPIFGNIVDEVAYHEKYPTIYHLRKKLVDSTDKADLRLIYLALAHMIKFRGHFLIEGDLNPDNSDVDKLFIQLVQTYNQLFEENPINASGVDAKAILSARLSKSRRLENLIAQLPGEKKNGLFGNLIALSLGLTPNFKSNFDLAEDAKLQLSKDTYDDDLDNLLAQIGDQYADLFLAAKNLSDAILLSDILRVNTEITKAPLSASMIKRYDEHHQDLTLLKALVRQQLPEKYKEIFFDQSKNGYAGYIDGGASQEEFYKFIKPILEKMDGTEELLVKLNREDLLRKQRTFDNGSIPHQIHLGELHAILRRQEDFYPFLKDNREKIEKILTFRIPYYVGPLARGNSRFAWMTRKSEETITPWNFEEVVDKGASAQSFIERMTNFDKNLPNEKVLPKHSLLYEYFTVYNELTKVKYVTEGMRKPAFLSGEQKKAIVDLLFKTNRKVTVKQLKEDYFKKIECFDSVEISGVEDRFNASLGTYHDLLKIIKDKDFLDNEENEDILEDIVLTLTLFEDREMIEERLKTYAHLFDDKVMKQLKRRRYTGWGRLSRKLINGIRDKQSGKTILDFLKSDGFANRNFMQLIHDDSLTFKEDIQKAQVSGQGDSLHEHIANLAGSPAIKKGILQTVKVVDELVKVMGRHKPENIVIEMARENQTTQKGQKNSRERMKRIEEGIKELGSQILKEHPVENTQLQNEKLYLYYLQNGRDMYVDQELDINRLSDYDVDHIVPQSFLKDDSIDNKVLTRSDKNRGKSDNVPSEEVVKKMKNYWRQLLNAKLITQRKFDNLTKAERGGLSELDKAGFIKRQLVETRQITKHVAQILDSRMNTKYDENDKLIREVKVITLKSKLVSDFRKDFQFYKVREINNYHHAHDAYLNAVVGTALIKKYPKLESEFVYGDYKVYDVRKMIAKSEQEIGKATAKYFFYSNIMNFFKTEITLANGEIRKRPLIETNGETGEIVWDKGRDFATVRKVLSMPQVNIVKKTEVQTGGFSKESILPKRNSDKLIARKKDWDPKKYGGFDSPTVAYSVLVVAKVEKGKSKKLKSVKELLGITIMERSSFEKNPIDFLEAKGYKEVKKDLIIKLPKYSLFELENGRKRMLASAGELQKGNELALPSKYVNFLYLASHYEKLKGSPEDNEQKQLFVEQHKHYLDEIIEQISEFSKRVILADANLDKVLSAYNKHRDKPIREQAENIIHLFTLTNLGAPAAFKYFDTTIDRKRYTSTKEVLDATLIHQSITGLYETRIDLSQLGGDSGGSPKKKRKV

SEQ ID NO: 175 - protein, 1561 aa, Artificial Sequence
  Synthetic
MSEVEFSHEYWMRHALTLAKRAWDEREVPVGAVLVHNNRVIGEGWNRPIGRHDPTAHAEIMALRQGGLVMQNYRLIDATLYVTLEPCVMCAGAMIHSRIGRVVFGARNAKTGAAGSLMDVLHHPGMNHRVEITEGILADECAALLSDFFRMRRQEIKAQKKAQSSTDSGSETPGTSESATPESDKKYSIGLAIGTNSVGWAVITDEYKVPSKKFKVLGNTDRHSIKKNLIGALLFDSGETAEATRLKRTARRRYTRRKNRICYLQEIFSNEMAKVDDSFFHRLEESFLVEEDKKHERHPIFGNIVDEVAYHEKYPTIYHLRKKLVDSTDKADLRLIYLALAHMIKFRGHFLIEGDLNPDNSDVDKLFIQLVQTYNQLFEENPINASGVDAKAILSARLSKSRRLENLIAQLPGEKKNGLFGNLIALSLGLTPNFKSNFDLAEDAKLQLSKDTYDDDLDNLLAQIGDQYADLFLAAKNLSDAILLSDILRVNTEITKAPLSASMIKRYDEHHQDLTLLKALVRQQLPEKYKEIFFDQSKNGYAGYIDGGASQEEFYKFIKPILEKMDGTEELLVKLNREDLLRKQRTFDNGSIPHQIHLGELHAILRRQEDFYPFLKDNREKIEKILTFRIPYYVGPLARGNSRFAWMTRKSEETITPWNFEEVVDKGASAQSFIERMTNFDKNLPNEKVLPKHSLLYEYFTVYNELTKVKYVTEGMRKPAFLSGEQKKAIVDLLFKTNRKVTVKQLKEDYFKKIECFDSVEISGVEDRFNASLGTYHDLLKIIKDKDFLDNEENEDILEDIVLTLTLFEDREMIEERLKTYAHLFDDKVMKQLKRRRYTGWGRLSRKLINGIRDKQSGKTILDFLKSDGFANRNFMQLIHDDSLTFKEDIQKAQVSGQGDSLHEHIANLAGSPAIKKGILQTVKVVDELVKVMGRHKPENIVIEMARENQTTQKGQKNSRERMKRIEEGIKELGSQILKEHPVENTQLQNEKLYLYYLQNGRDMYVDQELDINRLSDYDVDHIVPQSFLKDDSIDNKVLTRSDKNRGKSDNVPSEEVVKKMKNYWRQLLNAKLITQRKFDNLTKAERGGLSELDKAGFIKRQLVETRQITKHVAQILDSRMNTKYDENDKLIREVKVITLKSKLVSDFRKDFQFYKVREINNYHHAHDAYLNAVVGTALIKKYPKLESEFVYGDYKVYDVRKMIAKSEQEIGKATAKYFFYSNIMNFFKTEITLANGEIRKRPLIETNGETGEIVWDKGRDFATVRKVLSMPQVNIVKKTEVQTGGFSKESILPKRNSDKLIARKKDWDPKKYGGFDSPTVAYSVLVVAKVEKGKSKKLKSVKELLGITIMERSSFEKNPIDFLEAKGYKEVKKDLIIKLPKYSLFELENGRKRMLASAGELQKGNELALPSKYVNFLYLASHYEKLKGSPEDNEQKQLFVEQHKHYLDEIIEQISEFSKRVILADANLDKVLSAYNKHRDKPIREQAENIIHLFTLTNLGAPAAFKYFDTTIDRKRYTSTKEVLDATLIHQSITGLYETRIDLSQLGGDSGGSPKKKRKV

SEQ ID NO: 176 - protein, 1561 aa, Artificial Sequence
  Synthetic
MSEVEFSHEYWMRHALTLAKRAWDEREVPVGAVLVHNNRVIGEGWNRPIGRHDPTAHAEIMALRQGGLVMQNYRLIDATLYVTLEPCVMCAGAMIHSRIGRVVFGARGAKTGAAGSLMDVLHHPGMNHRVEITEGILADECAALLSDFFRMRRQEIKAQKKAQSSTDSGSETPGTSESATPESDKKYSIGLAIGTNSVGWAVITDEYKVPSKKFKVLGNTDRHSIKKNLIGALLFDSGETAEATRLKRTARRRYTRRKNRICYLQEIFSNEMAKVDDSFFHRLEESFLVEEDKKHERHPIFGNIVDEVAYHEKYPTIYHLRKKLVDSTDKADLRLIYLALAHMIKFRGHFLIEGDLNPDNSDVDKLFIQLVQTYNQLFEENPINASGVDAKAILSARLSKSRRLENLIAQLPGEKKNGLFGNLIALSLGLTPNFKSNFDLAEDAKLQLSKDTYDDDLDNLLAQIGDQYADLFLAAKNLSDAILLSDILRVNTEITKAPLSASMIKRYDEHHQDLTLLKALVRQQLPEKYKEIFFDQSKNGYAGYIDGGASQEEFYKFIKPILEKMDGTEELLVKLNREDLLRKQRTFDNGSIPHQIHLGELHAILRRQEDFYPFLKDNREKIEKILTFRIPYYVGPLARGNSRFAWMTRKSEETITPWNFEEVVDKGASAQSFIERMTNFDKNLPNEKVLPKHSLLYEYFTVYNELTKVKYVTEGMRKPAFLSGEQKKAIVDLLFKTNRKVTVKQLKEDYFKKIECFDSVEISGVEDRFNASLGTYHDLLKIIKDKDFLDNEENEDILEDIVLTLTLFEDREMIEERLKTYAHLFDDKVMKQLKRRRYTGWGRLSRKLINGIRDKQSGKTILDFLKSDGFANRNFMQLIHDDSLTFKEDIQKAQVSGQGDSLHEHIANLAGSPAIKKGILQTVKVVDELVKVMGRHKPENIVIEMARENQTTQKGQKNSRERMKRIEEGIKELGSQILKEHPVENTQLQNEKLYLYYLQNGRDMYVDQELDINRLSDYDVDHIVPQSFLKDDSIDNKVLTRSDKNRGKSDNVPSEEVVKKMKNYWRQLLNAKLITQRKFDNLTKAERGGLSELDKAGFIKRQLVETRQITKHVAQILDSRMNTKYDENDKLIREVKVITLKSKLVSDFRKDFQFYKVREINNYHHAHDAYLNAVVGTALIKKYPKLESEFVYGDYKVYDVRKMIAKSEQEIGKATAKYFFYSNIMNFFKTEITLANGEIRKRPLIETNGETGEIVWDKGRDFATVRKVLSMPQVNIVKKTEVQTGGFSKESILPKRNSDKLIARKKDWDPKKYGGFDSPTVAYSVLVVAKVEKGKSKKLKSVKELLGITIMERSSFEKNPIDFLEAKGYKEVKKDLIIKLPKYSLFELENGRKRMLASAGELQKGNELALPSKYVNFLYLASHYEKLKGSPEDNEQKQLFVEQHKHYLDEIIEQISEFSKRVILADANLDKVLSAYNKHRDKPIREQAENIIHLFTLTNLGAPAAFKYFDTTIDRKRYTSTKEVLDATLIHQSITGLYETRIDLSQLGGDSGGSPKKKRKV

SEQ ID NO: 177 - protein, 1561 aa, Artificial Sequence
  Synthetic
MSEVEFSHEYWMRHALTLAKRAWDEREVPVGAVLVHNNRVIGEGWNRPIGRHDPTAHAEIMALRQGGLVMQNYRLIDATLYVTLEPCVMCAGAMIHSRIGRVVFGARVAKTGAAGSLMDVLHHPGMNHRVEITEGILADECAALLSDFFRMRRQEIKAQKKAQSSTDSGSETPGTSESATPESDKKYSIGLAIGTNSVGWAVITDEYKVPSKKFKVLGNTDRHSIKKNLIGALLFDSGETAEATRLKRTARRRYTRRKNRICYLQEIFSNEMAKVDDSFFHRLEESFLVEEDKKHERHPIFGNIVDEVAYHEKYPTIYHLRKKLVDSTDKADLRLIYLALAHMIKFRGHFLIEGDLNPDNSDVDKLFIQLVQTYNQLFEENPINASGVDAKAILSARLSKSRRLENLIAQLPGEKKNGLFGNLIALSLGLTPNFKSNFDLAEDAKLQLSKDTYDDDLDNLLAQIGDQYADLFLAAKNLSDAILLSDILRVNTEITKAPLSASMIKRYDEHHQDLTLLKALVRQQLPEKYKEIFFDQSKNGYAGYIDGGASQEEFYKFIKPILEKMDGTEELLVKLNREDLLRKQRTFDNGSIPHQIHLGELHAILRRQEDFYPFLKDNREKIEKILTFRIPYYVGPLARGNSRFAWMTRKSEETITPWNFEEVVDKGASAQSFIERMTNFDKNLPNEKVLPKHSLLYEYFTVYNELTKVKYVTEGMRKPAFLSGEQKKAIVDLLFKTNRKVTVKQLKEDYFKKIECFDSVEISGVEDRFNASLGTYHDLLKIIKDKDFLDNEENEDILEDIVLTLTLFEDREMIEERLKTYAHLFDDKVMKQLKRRRYTGWGRLSRKLINGIRDKQSGKTILDFLKSDGFANRNFMQLIHDDSLTFKEDIQKAQVSGQGDSLHEHIANLAGSPAIKKGILQTVKVVDELVKVMGRHKPENIVIEMARENQTTQKGQKNSRERMKRIEEGIKELGSQILKEHPVENTQLQNEKLYLYYLQNGRDMYVDQELDINRLSDYDVDHIVPQSFLKDDSIDNKVLTRSDKNRGKSDNVPSEEVVKKMKNYWRQLLNAKLITQRKFDNLTKAERGGLSELDKAGFIKRQLVETRQITKHVAQILDSRMNTKYDENDKLIREVKVITLKSKLVSDFRKDFQFYKVREINNYHHAHDAYLNAVVGTALIKKYPKLESEFVYGDYKVYDVRKMIAKSEQEIGKATAKYFFYSNIMNFFKTEITLANGEIRKRPLIETNGETGEIVWDKGRDFATVRKVLSMPQVNIVKKTEVQTGGFSKESILPKRNSDKLIARKKDWDPKKYGGFDSPTVAYSVLVVAKVEKGKSKKLKSVKELLGITIMERSSFEKNPIDFLEAKGYKEVKKDLIIKLPKYSLFELENGRKRMLASAGELQKGNELALPSKYVNFLYLASHYEKLKGSPEDNEQKQLFVEQHKHYLDEIIEQISEFSKRVILADANLDKVLSAYNKHRDKPIREQAENIIHLFTLTNLGAPAAFKYFDTTIDRKRYTSTKEVLDATLIHQSITGLYETRIDLSQLGGDSGGSPKKKRKV

SEQ ID NO: 178 - protein, 1550 aa, Artificial Sequence
  Synthetic
MSEVEFSYEYWMRHALTLAKRAWDEREVPVGAVLVHNNRVIGEGWNRPIGRHDPTAHAEIMALRQGGLVMQNYRLIDATLYVTLEPCVMCAGAMIHSRIGRVVFGARNAKTGAAGSLMDVLHHPGMSHRVEITEGILADECAALLSDFFRMRRQEIKAQKKAQSSTDSGSETPGTSESATPESDKKYSIGLAIGTNSVGWAVITDEYKVPSKKFKVLGNTDRHSIKKNLIGALLFDSGETAEATRLKRTARRRYTRRKNRICYLQEIFSNEMAKVDDSFFHRLEESFLVEEDKKHERHPIFGNIVDEVAYHEKYPTIYHLRKKLVDSTDKADLRLIYLALAHMIKFRGHFLIEGDLNPDNSDVDKLFIQLVQTYNQLFEENPINASGVDAKAILSARLSKSRRLENLIAQLPGEKKNGLFGNLIALSLGLTPNFKSNFDLAEDAKLQLSKDTYDDDLDNLLAQIGDQYADLFLAAKNLSDAILLSDILRVNTEITKAPLSASMIKRYDEHHQDLTLLKALVRQQLPEKYKEIFFDQSKNGYAGYIDGGASQEEFYKFIKPILEKMDGTEELLVKLNREDLLRKQRTFDNGSIPHQIHLGELHAILRRQEDFYPFLKDNREKIEKILTFRIPYYVGPLARGNSRFAWMTRKSEETITPWNFEEVVDKGASAQSFIERMTNFDKNLPNEKVLPKHSLLYEYFTVYNELTKVKYVTEGMRKPAFLSGEQKKAIVDLLFKTNRKVTVKQLKEDYFKKIECFDSVEISGVEDRFNASLGTYHDLLKIIKDKDFLDNEENEDILEDIVLTLTLFEDREMIEERLKTYAHLFDDKVMKQLKRRRYTGWGRLSRKLINGIRDKQSGKTILDFLKSDGFANRNFMQLIHDDSLTFKEDIQKAQVSGQGDSLHEHIANLAGSPAIKKGILQTVKVVDELVKVMGRHKPENIVIEMARENQTTQKGQKNSRERMKRIEEGIKELGSQILKEHPVENTQLQNEKLYLYYLQNGRDMYVDQELDINRLSDYDVDAIVPQSFLKDDSIDNKVLTRSDKNRGKSDNVPSEEVVKKMKNYWRQLLNAKLITQRKFDNLTKAERGGLSELDKAGFIKRQLVETRQITKHVAQILDSRMNTKYDENDKLIREVKVITLKSKLVSDFRKDFQFYKVREINNYHHAHDAYLNAVVGTALIKKYPKLESEFVYGDYKVYDVRKMIAKSEQEIGKATAKYFFYSNIMNFFKTEITLANGEIRKRPLIETNGETGEIVWDKGRDFATVRKVLSMPQVNIVKKTEVQTGGFSKESILPKRNSDKLIARKKDWDPKKYGGFDSPTVAYSVLVVAKVEKGKSKKLKSVKELLGITIMERSSFEKNPIDFLEAKGYKEVKKDLIIKLPKYSLFELENGRKRMLASAGELQKGNELALPSKYVNFLYLASHYEKLKGSPEDNEQKQLFVEQHKHYLDEIIEQISEFSKRVILADANLDKVLSAYNKHRDKPIREQAENIIHLFTLTNLGAPAAFKYFDTTIDRKRYTSTKEVLDATLIHQSITGLYETRIDLSQLGGD

SEQ ID NO: 179 - protein, 1550 aa, Artificial Sequence
  Synthetic
  misc_feature (155)..(155): Xaa can be any naturally occurring amino acid
MSEVEFSYEYWMRHALTLAKRAWDEREVPVGAVLVHNNRVIGEGWNRPIGRHDPTAHAEIMALRQGGLVMQNYRLIDATLYVTLEPCVMCAGAMIHSRIGRVVFGARNAKTGAAGSLMDVLHHPGMSHRVEITEGILADECAALLSDFFRMRRQXIKAQKKAQSSTDSGSETPGTSESATPESDKKYSIGLAIGTNSVGWAVITDEYKVPSKKFKVLGNTDRHSIKKNLIGALLFDSGETAEATRLKRTARRRYTRRKNRICYLQEIFSNEMAKVDDSFFHRLEESFLVEEDKKHERHPIFGNIVDEVAYHEKYPTIYHLRKKLVDSTDKADLRLIYLALAHMIKFRGHFLIEGDLNPDNSDVDKLFIQLVQTYNQLFEENPINASGVDAKAILSARLSKSRRLENLIAQLPGEKKNGLFGNLIALSLGLTPNFKSNFDLAEDAKLQLSKDTYDDDLDNLLAQIGDQYADLFLAAKNLSDAILLSDILRVNTEITKAPLSASMIKRYDEHHQDLTLLKALVRQQLPEKYKEIFFDQSKNGYAGYIDGGASQEEFYKFIKPILEKMDGTEELLVKLNREDLLRKQRTFDNGSIPHQIHLGELHAILRRQEDFYPFLKDNREKIEKILTFRIPYYVGPLARGNSRFAWMTRKSEETITPWNFEEVVDKGASAQSFIERMTNFDKNLPNEKVLPKHSLLYEYFTVYNELTKVKYVTEGMRKPAFLSGEQKKAIVDLLFKTNRKVTVKQLKEDYFKKIECFDSVEISGVEDRFNASLGTYHDLLKIIKDKDFLDNEENEDILEDIVLTLTLFEDREMIEERLKTYAHLFDDKVMKQLKRRRYTGWGRLSRKLINGIRDKQSGKTILDFLKSDGFANRNFMQLIHDDSLTFKEDIQKAQVSGQGDSLHEHIANLAGSPAIKKGILQTVKVVDELVKVMGRHKPENIVIEMARENQTTQKGQKNSRERMKRIEEGIKELGSQILKEHPVENTQLQNEKLYLYYLQNGRDMYVDQELDINRLSDYDVDAIVPQSFLKDDSIDNKVLTRSDKNRGKSDNVPSEEVVKKMKNYWRQLLNAKLITQRKFDNLTKAERGGLSELDKAGFIKRQLVETRQITKHVAQILDSRMNTKYDENDKLIREVKVITLKSKLVSDFRKDFQFYKVREINNYHHAHDAYLNAVVGTALIKKYPKLESEFVYGDYKVYDVRKMIAKSEQEIGKATAKYFFYSNIMNFFKTEITLANGEIRKRPLIETNGETGEIVWDKGRDFATVRKVLSMPQVNIVKKTEVQTGGFSKESILPKRNSDKLIARKKDWDPKKYGGFDSPTVAYSVLVVAKVEKGKSKKLKSVKELLGITIMERSSFEKNPIDFLEAKGYKEVKKDLIIKLPKYSLFELENGRKRMLASAGELQKGNELALPSKYVNFLYLASHYEKLKGSPEDNEQKQLFVEQHKHYLDEIIEQISEFSKRVILADANLDKVLSAYNKHRDKPIREQAENIIHLFTLTNLGAPAAFKYFDTTIDRKRYTSTKEVLDATLIHQSITGLYETRIDLSQLGGD

SEQ ID NO: 180 - protein, 1775 aa, Artificial Sequence
  Synthetic
MSEVEFSHEYWMRHALTLAKRAWDEREVPVGAVLVHNNRVIGEGWNRPIGRHDPTAHAEIMALRQGGLVMQNYRLIDATLYVTLEPCVMCAGAMIHSRIGRVVFGARDAKTGAAGSLMDVLHHPGMNHRVEITEGILADECAALLSDFFRMRRQEIKAQKKAQSSTDSGGSSGGSSGSETPGTSESATPESSGGSSGGSSEVEFSHEYWMRHALTLAKRALDEREVPVGAVLVLNNRVIGEGWNRAIGLHDPTAHAEIMALRQGGLVMQNYRLIDATLYVTFEPCVMCAGAMIHSRIGRVVFGVRNAKTGAAGSLMDVLHYPGMNHRVEITEGILADECAALLCYFFRMPRQVFNAQKKAQSSTDSGGSSGGSSGSETPGTSESATPESSGGSSGGSDKKYSIGLAIGTNSVGWAVITDEYKVPSKKFKVLGNTDRHSIKKNLIGALLFDSGETAEATRLKRTARRRYTRRKNRICYLQEIFSNEMAKVDDSFFHRLEESFLVEEDKKHERHPIFGNIVDEVAYHEKYPTIYHLRKKLVDSTDKADLRLIYLALAHMIKFRGHFLIEGDLNPDNSDVDKLFIQLVQTYNQLFEENPINASGVDAKAILSARLSKSRRLENLIAQLPGEKKNGLFGNLIALSLGLTPNFKSNFDLAEDAKLQLSKDTYDDDLDNLLAQIGDQYADLFLAAKNLSDAILLSDILRVNTEITKAPLSASMIKRYDEHHQDLTLLKALVRQQLPEKYKEIFFDQSKNGYAGYIDGGASQEEFYKFIKPILEKMDGTEELLVKLNREDLLRKQRTFDNGSIPHQIHLGELHAILRRQEDFYPFLKDNREKIEKILTFRIPYYVGPLARGNSRFAWMTRKSEETITPWNFEEVVDKGASAQSFIERMTNFDKNLPNEKVLPKHSLLYEYFTVYNELTKVKYVTEGMRKPAFLSGEQKKAIVDLLFKTNRKVTVKQLKEDYFKKIECFDSVEISGVEDRFNASLGTYHDLLKIIKDKDFLDNEENEDILEDIVLTLTLFEDREMIEERLKTYAHLFDDKVMKQLKRRRYTGWGRLSRKLINGIRDKQSGKTILDFLKSDGFANRNFMQLIHDDSLTFKEDIQKAQVSGQGDSLHEHIANLAGSPAIKKGILQTVKVVDELVKVMGRHKPENIVIEMARENQTTQKGQKNSRERMKRIEEGIKELGSQILKEHPVENTQLQNEKLYLYYLQNGRDMYVDQELDINRLSDYDVDHIVPQSFLKDDSIDNKVLTRSDKNRGKSDNVPSEEVVKKMKNYWRQLLNAKLITQRKFDNLTKAERGGLSELDKAGFIKRQLVETRQITKHVAQILDSRMNTKYDENDKLIREVKVITLKSKLVSDFRKDFQFYKVREINNYHHAHDAYLNAVVGTALIKKYPKLESEFVYGDYKVYDVRKMIAKSEQEIGKATAKYFFYSNIMNFFKTEITLANGEIRKRPLIETNGETGEIVWDKGRDFATVRKVLSMPQVNIVKKTEVQTGGFSKESILPKRNSDKLIARKKDWDPKKYGGFDSPTVAYSVLVVAKVEKGKSKKLKSVKELLGITIMERSSFEKNPIDFLEAKGYKEVKKDLIIKLPKYSLFELENGRKRMLASAGELQKGNELALPSKYVNFLYLASHYEKLKGSPEDNEQKQLFVEQHKHYLDEIIEQISEFSKRVILADANLDKVLSAYNKHRDKPIREQAENIIHLFTLTNLGAPAAFKYFDTTIDRKRYTSTKEVLDATLIHQSITGLYETRIDLSQLGGDSGGSPKKKRKV

SEQ ID NO: 181 - protein, 1767 aa, Artificial Sequence
  Synthetic
MSEVEFSHEYWMRHALTLAKRAWDEREVPVGAVLVHNNRVIGEGWNRPIGRHDPTAHAEIMALRQGGLVMQNYRLIDATLYVTLEPCVMCAGAMIHSRIGRVVFGARDAKTGAAGSLMDVLHHPGMNHRVEITEGILADECAALLSDFFRMRRQEIKAQKKAQSSTDSGGSSGGSSGSETPGTSESATPESSGGSSGGSSEVEFSHEYWMRHALTLAKRARDEREVPVGAVLVLNNRVIGEGWNRAIGLHDPTAHAEIMALRQGGLVMQNYRLIDATLYVTFEPCVMCAGAMIHSRIGRVVFGVRNAKTGAAGSLMDVLHYPGMNHRVEITEGILADECAALLCYFFRMPRQVFNAQKKAQSSTDSGGSSGGSSGSETPGTSESATPESDKKYSIGLAIGTNSVGWAVITDEYKVPSKKFKVLGNTDRHSIKKNLIGALLFDSGETAEATRLKRTARRRYTRRKNRICYLQEIFSNEMAKVDDSFFHRLEESFLVEEDKKHERHPIFGNIVDEVAYHEKYPTIYHLRKKLVDSTDKADLRLIYLALAHMIKFRGHFLIEGDLNPDNSDVDKLFIQLVQTYNQLFEENPINASGVDAKAILSARLSKSRRLENLIAQLPGEKKNGLFGNLIALSLGLTPNFKSNFDLAEDAKLQLSKDTYDDDLDNLLAQIGDQYADLFLAAKNLSDAILLSDILRVNTEITKAPLSASMIKRYDEHHQDLTLLKALVRQQLPEKYKEIFFDQSKNGYAGYIDGGASQEEFYKFIKPILEKMDGTEELLVKLNREDLLRKQRTFDNGSIPHQIHLGELHAILRRQEDFYPFLKDNREKIEKILTFRIPYYVGPLARGNSRFAWMTRKSEETITPWNFEEVVDKGASAQSFIERMTNFDKNLPNEKVLPKHSLLYEYFTVYNELTKVKYVTEGMRKPAFLSGEQKKAIVDLLFKTNRKVTVKQLKEDYFKKIECFDSVEISGVEDRFNASLGTYHDLLKIIKDKDFLDNEENEDILEDIVLTLTLFEDREMIEERLKTYAHLFDDKVMKQLKRRRYTGWGRLSRKLINGIRDKQSGKTILDFLKSDGFANRNFMQLIHDDSLTFKEDIQKAQVSGQGDSLHEHIANLAGSPAIKKGILQTVKVVDELVKVMGRHKPENIVIEMARENQTTQKGQKNSRERMKRIEEGIKELGSQILKEHPVENTQLQNEKLYLYYLQNGRDMYVDQELDINRLSDYDVDHIVPQSFLKDDSIDNKVLTRSDKNRGKSDNVPSEEVVKKMKNYWRQLLNAKLITQRKFDNLTKAERGGLSELDKAGFIKRQLVETRQITKHVAQILDSRMNTKYDENDKLIREVKVITLKSKLVSDFRKDFQFYKVREINNYHHAHDAYLNAVVGTALIKKYPKLESEFVYGDYKVYDVRKMIAKSEQEIGKATAKYFFYSNIMNFFKTEITLANGEIRKRPLIETNGETGEIVWDKGRDFATVRKVLSMPQVNIVKKTEVQTGGFSKESILPKRNSDKLIARKKDWDPKKYGGFDSPTVAYSVLVVAKVEKGKSKKLKSVKELLGITIMERSSFEKNPIDFLEAKGYKEVKKDLIIKLPKYSLFELENGRKRMLASAGELQKGNELALPSKYVNFLYLASHYEKLKGSPEDNEQKQLFVEQHKHYLDEIIEQISEFSKRVILADANLDKVLSAYNKHRDKPIREQAENIIHLFTLTNLGAPAAFKYFDTTIDRKRYTSTKEVLDATLIHQSITGLYETRIDLSQLGGDSGGSPKKKRKV

SEQ ID NO: 182 - protein, 1775 aa, Artificial Sequence
  Synthetic
MSEVEFSHEYWMRHALTLAKRAWDEREVPVGAVLVHNNRVIGEGWNRPIGRHDPTAHAEIMALRQGGLVMQNYRLIDATLYVTLEPCVMCAGAMIHSRIGRVVFGARDAKTGAAGSLMDVLHHPGMNHRVEITEGILADECAALLSDFFRMRRQEIKAQKKAQSSTDSGGSSGGSSGSETPGTSESATPESSGGSSGGSSEVEFSHEYWMRHALTLAKRAWDEREVPVGAVLVHNNRVIGEGWNRPIGRHDPTAHAEIMALRQGGLVMQNYRLIDATLYVTFEPCVMCAGAMIHSRIGRVVFGVRNAKTGAAGSLMDVLHYPGMNHRVEITEGILADECAALLSYFFRMRRQVFKAQKKAQSSTDSGGSSGGSSGSETPGTSESATPESSGGSSGGSDKKYSIGLAIGTNSVGWAVITDEYKVPSKKFKVLGNTDRHSIKKNLIGALLFDSGETAEATRLKRTARRRYTRRKNRICYLQEIFSNEMAKVDDSFFHRLEESFLVEEDKKHERHPIFGNIVDEVAYHEKYPTIYHLRKKLVDSTDKADLRLIYLALAHMIKFRGHFLIEGDLNPDNSDVDKLFIQLVQTYNQLFEENPINASGVDAKAILSARLSKSRRLENLIAQLPGEKKNGLFGNLIALSLGLTPNFKSNFDLAEDAKLQLSKDTYDDDLDNLLAQIGDQYADLFLAAKNLSDAILLSDILRVNTEITKAPLSASMIKRYDEHHQDLTLLKALVRQQLPEKYKEIFFDQSKNGYAGYIDGGASQEEFYKFIKPILEKMDGTEELLVKLNREDLLRKQRTFDNGSIPHQIHLGELHAILRRQEDFYPFLKDNREKIEKILTFRIPYYVGPLARGNSRFAWMTRKSEETITPWNFEEVVDKGASAQSFIERMTNFDKNLPNEKVLPKHSLLYEYFTVYNELTKVKYVTEGMRKPAFLSGEQKKAIVDLLFKTNRKVTVKQLKEDYFKKIECFDSVEISGVEDRFNASLGTYHDLLKIIKDKDFLDNEENEDILEDIVLTLTLFEDREMIEERLKTYAHLFDDKVMKQLKRRRYTGWGRLSRKLINGIRDKQSGKTILDFLKSDGFANRNFMQLIHDDSLTFKEDIQKAQVSGQGDSLHEHIANLAGSPAIKKGILQTVKVVDELVKVMGRHKPENIVIEMARENQTTQKGQKNSRERMKRIEEGIKELGSQILKEHPVENTQLQNEKLYLYYLQNGRDMYVDQELDINRLSDYDVDHIVPQSFLKDDSIDNKVLTRSDKNRGKSDNVPSEEVVKKMKNYWRQLLNAKLITQRKFDNLTKAERGGLSELDKAGFIKRQLVETRQITKHVAQILDSRMNTKYDENDKLIREVKVITLKSKLVSDFRKDFQFYKVREINNYHHAHDAYLNAVVGTALIKKYPKLESEFVYGDYKVYDVRKMIAKSEQEIGKATAKYFFYSNIMNFFKTEITLANGEIRKRPLIETNGETGEIVWDKGRDFATVRKVLSMPQVNIVKKTEVQTGGFSKESILPKRNSDKLIARKKDWDPKKYGGFDSPTVAYSVLVVAKVEKGKSKKLKSVKELLGITIMERSSFEKNPIDFLEAKGYKEVKKDLIIKLPKYSLFELENGRKRMLASAGELQKGNELALPSKYVNFLYLASHYEKLKGSPEDNEQKQLFVEQHKHYLDEIIEQISEFSKRVILADANLDKVLSAYNKHRDKPIREQAENIIHLFTLTNLGAPAAFKYFDTTIDRKRYTSTKEVLDATLIHQSITGLYETRIDLSQLGGDSGGSPKKKRKV

SEQ ID NO: 183 - protein, 1775 aa, Artificial Sequence
  Synthetic
MSEVEFSHEYWMRHALTLAKRAWDEREVPVGAVLVHNNRVIGEGWNRPIGRHDPTAHAEIMALRQGGLVMQNYRLIDATLYVTLEPCVMCAGAMIHSRIGRVVFGARDAKTGAAGSLMDVLHHPGMNHRVEITEGILADECAALLSDFFRMRRQEIKAQKKAQSSTDSGGSSGGSSGSETPGTSESATPESSGGSSGGSSEVEFSHEYWMRHALTLAKRAWDEREVPVGAVLVLNNRVIGEGWNRPIGLHDPTAHAEIMALRQGGLVMQNYRLIDATLYVTFEPCVMCAGAMIHSRIGRVVFGVRNAKTGAAGSLMDVLHYPGMNHRVEITEGILADECAALLCYFFRMRRQVFNAQKKAQSSTDSGGSSGGSSGSETPGTSESATPESSGGSSGGSDKKYSIGLAIGTNSVGWAVITDEYKVPSKKFKVLGNTDRHSIKKNLIGALLFDSGETAEATRLKRTARRRYTRRKNRICYLQEIFSNEMAKVDDSFFHRLEESFLVEEDKKHERHPIFGNIVDEVAYHEKYPTIYHLRKKLVDSTDKADLRLIYLALAHMIKFRGHFLIEGDLNPDNSDVDKLFIQLVQTYNQLFEENPINASGVDAKAILSARLSKSRRLENLIAQLPGEKKNGLFGNLIALSLGLTPNFKSNFDLAEDAKLQLSKDTYDDDLDNLLAQIGDQYADLFLAAKNLSDAILLSDILRVNTEITKAPLSASMIKRYDEHHQDLTLLKALVRQQLPEKYKEIFFDQSKNGYAGYIDGGASQEEFYKFIKPILEKMDGTEELLVKLNREDLLRKQRTFDNGSIPHQIHLGELHAILRRQEDFYPFLKDNREKIEKILTFRIPYYVGPLARGNSRFAWMTRKSEETITPWNFEEVVDKGASAQSFIERMTNFDKNLPNEKVLPKHSLLYEYFTVYNELTKVKYVTEGMRKPAFLSGEQKKAIVDLLFKTNRKVTVKQLKEDYFKKIECFDSVEISGVEDRFNASLGTYHDLLKIIKDKDFLDNEENEDILEDIVLTLTLFEDREMIEERLKTYAHLFDDKVMKQLKRRRYTGWGRLSRKLINGIRDKQSGKTILDFLKSDGFANRNFMQLIHDDSLTFKEDIQKAQVSGQGDSLHEHIANLAGSPAIKKGILQTVKVVDELVKVMGRHKPENIVIEMARENQTTQKGQKNSRERMKRIEEGIKELGSQILKEHPVENTQLQNEKLYLYYLQNGRDMYVDQELDINRLSDYDVDHIVPQSFLKDDSIDNKVLTRSDKNRGKSDNVPSEEVVKKMKNYWRQLLNAKLITQRKFDNLTKAERGGLSELDKAGFIKRQLVETRQITKHVAQILDSRMNTKYDENDKLIREVKVITLKSKLVSDFRKDFQFYKVREINNYHHAHDAYLNAVVGTALIKKYPKLESEFVYGDYKVYDVRKMIAKSEQEIGKATAKYFFYSNIMNFFKTEITLANGEIRKRPLIETNGETGEIVWDKGRDFATVRKVLSMPQVNIVKKTEVQTGGFSKESILPKRNSDKLIARKKDWDPKKYGGFDSPTVAYSVLVVAKVEKGKSKKLKSVKELLGITIMERSSFEKNPIDFLEAKGYKEVKKDLIIKLPKYSLFELENGRKRMLASAGELQKGNELALPSKYVNFLYLASHYEKLKGSPEDNEQKQLFVEQHKHYLDEIIEQISEFSKRVILADANLDKVLSAYNKHRDKPIREQAENIIHLFTLTNLGAPAAFKYFDTTIDRKRYTSTKEVLDATLIHQSITGLYETRIDLSQLGGDSGGSPKKKRKV

SEQ ID NO: 184 - protein, 1767 aa, Artificial Sequence
  Synthetic
MSEVEFSHEYWMRHALTLAKRAWDEREVPVGAVLVHNNRVIGEGWNRPIGRHDPTAHAEIMALRQGGLVMQNYRLIDATLYVTLEPCVMCAGAMIHSRIGRVVFGARDAKTGAAGSLMDVLHHPGMNHRVEITEGILADECAALLSDFFRMRRQEIKAQKKAQSSTDSGGSSGGSSGSETPGTSESATPESSGGSSGGSSEVEFSHEYWMRHALTLAKRAWDEREVPVGAVLVLNNRVIGEGWNRPIGLHDPTAHAEIMALRQGGLVMQNYRLIDATLYVTFEPCVMCAGAMIHSRIGRVVFGVRNAKTGAAGSLMDVLHYPGMNHRVEITEGILADECAALLCYFFRMRRQVFNAQKKAQSSTDSGGSSGGSSGSETPGTSESATPESDKKYSIGLAIGTNSVGWAVITDEYKVPSKKFKVLGNTDRHSIKKNLIGALLFDSGETAEATRLKRTARRRYTRRKNRICYLQEIFSNEMAKVDDSFFHRLEESFLVEEDKKHERHPIFGNIVDEVAYHEKYPTIYHLRKKLVDSTDKADLRLIYLALAHMIKFRGHFLIEGDLNPDNSDVDKLFIQLVQTYNQLFEENPINASGVDAKAILSARLSKSRRLENLIAQLPGEKKNGLFGNLIALSLGLTPNFKSNFDLAEDAKLQLSKDTYDDDLDNLLAQIGDQYADLFLAAKNLSDAILLSDILRVNTEITKAPLSASMIKRYDEHHQDLTLLKALVRQQLPEKYKEIFFDQSKNGYAGYIDGGASQEEFYKFIKPILEKMDGTEELLVKLNREDLLRKQRTFDNGSIPHQIHLGELHAILRRQEDFYPFLKDNREKIEKILTFRIPYYVGPLARGNSRFAWMTRKSEETITPWNFEEVVDKGASAQSFIERMTNFDKNLPNEKVLPKHSLLYEYFTVYNELTKVKYVTEGMRKPAFLSGEQKKAIVDLLFKTNRKVTVKQLKEDYFKKIECFDSVEISGVEDRFNASLGTYHDLLKIIKDKDFLDNEENEDILEDIVLTLTLFEDREMIEERLKTYAHLFDDKVMKQLKRRRYTGWGRLSRKLINGIRDKQSGKTILDFLKSDGFANRNFMQLIHDDSLTFKEDIQKAQVSGQGDSLHEHIANLAGSPAIKKGILQTVKVVDELVKVMGRHKPENIVIEMARENQTTQKGQKNSRERMKRIEEGIKELGSQILKEHPVENTQLQNEKLYLYYLQNGRDMYVDQELDINRLSDYDVDHIVPQSFLKDDSIDNKVLTRSDKNRGKSDNVPSEEVVKKMKNYWRQLLNAKLITQRKFDNLTKAERGGLSELDKAGFIKRQLVETRQITKHVAQILDSRMNTKYDENDKLIREVKVITLKSKLVSDFRKDFQFYKVREINNYHHAHDAYLNAVVGTALIKKYPKLESEFVYGDYKVYDVRKMIAKSEQEIGKATAKYFFYSNIMNFFKTEITLANGEIRKRPLIETNGETGEIVWDKGRDFATVRKVLSMPQVNIVKKTEVQTGGFSKESILPKRNSDKLIARKKDWDPKKYGGFDSPTVAYSVLVVAKVEKGKSKKLKSVKELLGITIMERSSFEKNPIDFLEAKGYKEVKKDLIIKLPKYSLFELENGRKRMLASAGELQKGNELALPSKYVNFLYLASHYEKLKGSPEDNEQKQLFVEQHKHYLDEIIEQISEFSKRVILADANLDKVLSAYNKHRDKPIREQAENIIHLFTLTNLGAPAAFKYFDTTIDRKRYTSTKEVLDATLIHQSITGLYETRIDLSQLGGDSGGSPKKKRKV

SEQ ID NO: 185 - protein, 1775 aa, Artificial Sequence
  Synthetic
MSEVEFSHEYWMRHALTLAKRAWDEREVPVGAVLVHNNRVIGEGWNRPIGRHDPTAHAEIMALRQGGLVMQNYRLIDATLYVTLEPCVMCAGAMIHSRIGRVVFGARDAKTGAAGSLMDVLHHPGMNHRVEITEGILADECAALLSDFFRMRRQEIKAQKKAQSSTDSGGSSGGSSGSETPGTSESATPESSGGSSGGSSEVEFSHEYWMRHALTLAKRAWDEREVPVGAVLVLNNRVIGEGWNRSIGLHDPTAHAEIMALRQGGLVMQNYRLIDATLYVTFEPCVMCAGAMIHSRIGRVVFGVRNAKTGAAGSLMDVLHYPGMNHRVEITEGILADECAALLCYFFRMRRQVFNAQKKAQSSTDSGGSSGGSSGSETPGTSESATPESSGGSSGGSDKKYSIGLAIGTNSVGWAVITDEYKVPSKKFKVLGNTDRHSIKKNLIGALLFDSGETAEATRLKRTARRRYTRRKNRICYLQEIFSNEMAKVDDSFFHRLEESFLVEEDKKHERHPIFGNIVDEVAYHEKYPTIYHLRKKLVDSTDKADLRLIYLALAHMIKFRGHFLIEGDLNPDNSDVDKLFIQLVQTYNQLFEENPINASGVDAKAILSARLSKSRRLENLIAQLPGEKKNGLFGNLIALSLGLTPNFKSNFDLAEDAKLQLSKDTYDDDLDNLLAQIGDQYADLFLAAKNLSDAILLSDILRVNTEITKAPLSASMIKRYDEHHQDLTLLKALVRQQLPEKYKEIFFDQSKNGYAGYIDGGASQEEFYKFIKPILEKMDGTEELLVKLNREDLLRKQRTFDNGSIPHQIHLGELHAILRRQEDFYPFLKDNREKIEKILTFRIPYYVGPLARGNSRFAWMTRKSEETITPWNFEEVVDKGASAQSFIERMTNFDKNLPNEKVLPKHSLLYEYFTVYNELTKVKYVTEGMRKPAFLSGEQKKAIVDLLFKTNRKVTVKQLKEDYFKKIECFDSVEISGVEDRFNASLGTYHDLLKIIKDKDFLDNEENEDILEDIVLTLTLFEDREMIEERLKTYAHLFDDKVMKQLKRRRYTGWGRLSRKLINGIRDKQSGKTILDFLKSDGFANRNFMQLIHDDSLTFKEDIQKAQVSGQGDSLHEHIANLAGSPAIKKGILQTVKVVDELVKVMGRHKPENIVIEMARENQTTQKGQKNSRERMKRIEEGIKELGSQILKEHPVENTQLQNEKLYLYYLQNGRDMYVDQELDINRLSDYDVDHIVPQSFLKDDSIDNKVLTRSDKNRGKSDNVPSEEVVKKMKNYWRQLLNAKLITQRKFDNLTKAERGGLSELDKAGFIKRQLVETRQITKHVAQILDSRMNTKYDENDKLIREVKVITLKSKLVSDFRKDFQFYKVREINNYHHAHDAYLNAVVGTALIKKYPKLESEFVYGDYKVYDVRKMIAKSEQEIGKATAKYFFYSNIMNFFKTEITLANGEIRKRPLIETNGETGEIVWDKGRDFATVRKVLSMPQVNIVKKTEVQTGGFSKESILPKRNSDKLIARKKDWDPKKYGGFDSPTVAYSVLVVAKVEKGKSKKLKSVKELLGITIMERSSFEKNPIDFLEAKGYKEVKKDLIIKLPKYSLFELENGRKRMLASAGELQKGNELALPSKYVNFLYLASHYEKLKGSPEDNEQKQLFVEQHKHYLDEIIEQISEFSKRVILADANLDKVLSAYNKHRDKPIREQAENIIHLFTLTNLGAPAAFKYFDTTIDRKRYTSTKEVLDATLIHQSITGLYETRIDLSQLGGDSGGSPKKKRKV

SEQ ID NO: 186 - protein, 1775 aa, Artificial Sequence
  Synthetic
MSEVEFSHEYWMRHALTLAKRAWDEREVPVGAVLVHNNRVIGEGWNRPIGRHDPTAHAEIMALRQGGLVMQNYRLIDATLYVTLEPCVMCAGAMIHSRIGRVVFGARDAKTGAAGSLMDVLHHPGMNHRVEITEGILADECAALLSDFFRMRRQEIKAQKKAQSSTDSGGSSGGSSGSETPGTSESATPESSGGSSGGSSEVEFSHEYWMRHALTLAKRAWDEREVPVGAVLVLNNRVIGEGWNRSIGLHDPTAHAEIMALRQGGLVMQNYRLIDATLYVTFEPCVMCAGAMIHSRIGRVVFGVRNAKTGAAGSLMDVLHYPGMNHRVEITEGILADECNALLCYFFRMRRQVFNAQKKAQSSTDSGGSSGGSSGSETPGTSESATPESSGGSSGGSDKKYSIGLAIGTNSVGWAVITDEYKVPSKKFKVLGNTDRHSIKKNLIGALLFDSGETAEATRLKRTARRRYTRRKNRICYLQEIFSNEMAKVDDSFFHRLEESFLVEEDKKHERHPIFGNIVDEVAYHEKYPTIYHLRKKLVDSTDKADLRLIYLALAHMIKFRGHFLIEGDLNPDNSDVDKLFIQLVQTYNQLFEENPINASGVDAKAILSARLSKSRRLENLIAQLPGEKKNGLFGNLIALSLGLTPNFKSNFDLAEDAKLQLSKDTYDDDLDNLLAQIGDQYADLFLAAKNLSDAILLSDILRVNTEITKAPLSASMIKRYDEHHQDLTLLKALVRQQLPEKYKEIFFDQSKNGYAGYIDGGASQEEFYKFIKPILEKMDGTEELLVKLNREDLLRKQRTFDNGSIPHQIHLGELHAILRRQEDFYPFLKDNREKIEKILTFRIPYYVGPLARGNSRFAWMTRKSEETITPWNFEEVVDKGASAQSFIERMTNFDKNLPNEKVLPKHSLLYEYFTVYNELTKVKYVTEGMRKPAFLSGEQKKAIVDLLFKTNRKVTVKQLKEDYFKKIECFDSVEISGVEDRFNASLGTYHDLLKIIKDKDFLDNEENEDILEDIVLTLTLFEDREMIEERLKTYAHLFDDKVMKQLKRRRYTGWGRLSRKLINGIRDKQSGKTILDFLKSDGFANRNFMQLIHDDSLTFKEDIQKAQVSGQGDSLHEHIANLAGSPAIKKGILQTVKVVDELVKVMGRHKPENIVIEMARENQTTQKGQKNSRERMKRIEEGIKELGSQILKEHPVENTQLQNEKLYLYYLQNGRDMYVDQELDINRLSDYDVDHIVPQSFLKDDSIDNKVLTRSDKNRGKSDNVPSEEVVKKMKNYWRQLLNAKLITQRKFDNLTKAERGGLSELDKAGFIKRQLVETRQITKHVAQILDSRMNTKYDENDKLIREVKVITLKSKLVSDFRKDFQFYKVREINNYHHAHDAYLNAVVGTALIKKYPKLESEFVYGDYKVYDVRKMIAKSEQEIGKATAKYFFYSNIMNFFKTEITLANGEIRKRPLIETNGETGEIVWDKGRDFATVRKVLSMPQVNIVKKTEVQTGGFSKESILPKRNSDKLIARKKDWDPKKYGGFDSPTVAYSVLVVAKVEKGKSKKLKSVKELLGITIMERSSFEKNPIDFLEAKGYKEVKKDLIIKLPKYSLFELENGRKRMLASAGELQKGNELALPSKYVNFLYLASHYEKLKGSPEDNEQKQLFVEQHKHYLDEIIEQISEFSKRVILADANLDKVLSAYNKHRDKPIREQAENIIHLFTLTNLGAPAAFKYFDTTIDRKRYTSTKEVLDATLIHQSITGLYETRIDLSQLGGDSGGSPKKKRKV

SEQ ID NO: 187 - protein, 1775 aa, Artificial Sequence
  Synthetic
MSEVEFSHEYWMRHALTLAKRAWDEREVPVGAVLVHNNRVIGEGWNRPIGRHDPTAHAEIMALRQGGLVMQNYRLIDATLYVTLEPCVMCAGAMIHSRIGRVVFGARDAKTGAAGSLMDVLHHPGMNHRVEITEGILADECAALLSDFFRMRRQEIKAQKKAQSSTDSGGSSGGSSGSETPGTSESATPESSGGSSGGSSEVEFSHEYWMRHALTLAKRAWDEREVPVGAVLVLNNRVIGEGWNRAIGLHDPTAHAEIMALRQGGLVMQNYRLIDATLYVTFEPCVMCAGAMIHSRIGRVVFGVRNAKTGAAGSLMDVLHYPGMNHRVEITEGILADECAALLCYFFRMRRQVFNAQKKAQSSTDSGGSSGGSSGSETPGTSESATPESSGGSSGGSDKKYSIGLAIGTNSVGWAVITDEYKVPSKKFKVLGNTDRHSIKKNLIGALLFDSGETAEATRLKRTARRRYTRRKNRICYLQEIFSNEMAKVDDSFFHRLEESFLVEEDKKHERHPIFGNIVDEVAYHEKYPTIYHLRKKLVDSTDKADLRLIYLALAHMIKFRGHFLIEGDLNPDNSDVDKLFIQLVQTYNQLFEENPINASGVDAKAILSARLSKSRRLENLIAQLPGEKKNGLFGNLIALSLGLTPNFKSNFDLAEDAKLQLSKDTYDDDLDNLLAQIGDQYADLFLAAKNLSDAILLSDILRVNTEITKAPLSASMIKRYDEHHQDLTLLKALVRQQLPEKYKEIFFDQSKNGYAGYIDGGASQEEFYKFIKPILEKMDGTEELLVKLNREDLLRKQRTFDNGSIPHQIHLGELHAILRRQEDFYPFLKDNREKIEKILTFRIPYYVGPLARGNSRFAWMTRKSEETITPWNFEEVVDKGASAQSFIERMTNFDKNLPNEKVLPKHSLLYEYFTVYNELTKVKYVTEGMRKPAFLSGEQKKAIVDLLFKTNRKVTVKQLKEDYFKKIECFDSVEISGVEDRFNASLGTYHDLLKIIKDKDFLDNEENEDILEDIVLTLTLFEDREMIEERLKTYAHLFDDKVMKQLKRRRYTGWGRLSRKLINGIRDKQSGKTILDFLKSDGFANRNFMQLIHDDSLTFKEDIQKAQVSGQGDSLHEHIANLAGSPAIKKGILQTVKVVDELVKVMGRHKPENIVIEMARENQTTQKGQKNSRERMKRIEEGIKELGSQILKEHPVENTQLQNEKLYLYYLQNGRDMYVDQELDINRLSDYDVDHIVPQSFLKDDSIDNKVLTRSDKNRGKSDNVPSEEVVKKMKNYWRQLLNAKLITQRKFDNLTKAERGGLSELDKAGFIKRQLVETRQITKHVAQILDSRMNTKYDENDKLIREVKVITLKSKLVSDFRKDFQFYKVREINNYHHAHDAYLNAVVGTALIKKYPKLESEFVYGDYKVYDVRKMIAKSEQEIGKATAKYFFYSNIMNFFKTEITLANGEIRKRPLIETNGETGEIVWDKGRDFATVRKVLSMPQVNIVKKTEVQTGGFSKESILPKRNSDKLIARKKDWDPKKYGGFDSPTVAYSVLVVAKVEKGKSKKLKSVKELLGITIMERSSFEKNPIDFLEAKGYKEVKKDLIIKLPKYSLFELENGRKRMLASAGELQKGNELALPSKYVNFLYLASHYEKLKGSPEDNEQKQLFVEQHKHYLDEIIEQISEFSKRVILADANLDKVLSAYNKHRDKPIREQAENIIHLFTLTNLGAPAAFKYFDTTIDRKRYTSTKEVLDATLIHQSITGLYETRIDLSQLGGDSGGSPKKKRKV

SEQ ID NO: 188 - protein, 1775 aa, Artificial Sequence
  Synthetic
MSEVEFSHEYWMRHALTLAKRAWDEREVPVGAVLVHNNRVIGEGWNRPIGRHDPTAHAEIMALRQGGLVMQNYRLIDATLYVTLEPCVMCAGAMIHSRIGRVVFGARDAKTGAAGSLMDVLHHPGMNHRVEITEGILADECAALLSDFFRMRRQEIKAQKKAQSSTDSGGSSGGSSGSETPGTSESATPESSGGSSGGSSEVEFSHEYWMRHALTLAKRAWDEREVPVGAVLVLNNRVIGEGWNRAIGLHDPTAHAEIMALRQGGLVMQNYRLIDATLYVTFEPCVMCAGAMIHSRIGRVVFGVRNAKTGAAGSLMDVLHYPGMNHRVEITEGILADECNALLCYFFRMRRQVFNAQKKAQSSTDSGGSSGGSSGSETPGTSESATPESSGGSSGGSDKKYSIGLAIGTNSVGWAVITDEYKVPSKKFKVLGNTDRHSIKKNLIGALLFDSGETAEATRLKRTARRRYTRRKNRICYLQEIFSNEMAKVDDSFFHRLEESFLVEEDKKHERHPIFGNIVDEVAYHEKYPTIYHLRKKLVDSTDKADLRLIYLALAHMIKFRGHFLIEGDLNPDNSDVDKLFIQLVQTYNQLFEENPINASGVDAKAILSARLSKSRRLENLIAQLPGEKKNGLFGNLIALSLGLTPNFKSNFDLAEDAKLQLSKDTYDDDLDNLLAQIGDQYADLFLAAKNLSDAILLSDILRVNTEITKAPLSASMIKRYDEHHQDLTLLKALVRQQLPEKYKEIFFDQSKNGYAGYIDGGASQEEFYKFIKPILEKMDGTEELLVKLNREDLLRKQRTFDNGSIPHQIHLGELHAILRRQEDFYPFLKDNREKIEKILTFRIPYYVGPLARGNSRFAWMTRKSEETITPWNFEEVVDKGASAQSFIERMTNFDKNLPNEKVLPKHSLLYEYFTVYNELTKVKYVTEGMRKPAFLSGEQKKAIVDLLFKTNRKVTVKQLKEDYFKKIECFDSVEISGVEDRFNASLGTYHDLLKIIKDKDFLDNEENEDILEDIVLTLTLFEDREMIEERLKTYAHLFDDKVMKQLKRRRYTGWGRLSRKLINGIRDKQSGKTILDFLKSDGFANRNFMQLIHDDSLTFKEDIQKAQVSGQGDSLHEHIANLAGSPAIKKGILQTVKVVDELVKVMGRHKPENIVIEMARENQTTQKGQKNSRERMKRIEEGIKELGSQILKEHPVENTQLQNEKLYLYYLQNGRDMYVDQELDINRLSDYDVDHIVPQSFLKDDSIDNKVLTRSDKNRGKSDNVPSEEVVKKMKNYWRQLLNAKLITQRKFDNLTKAERGGLSELDKAGFIKRQLVETRQITKHVAQILDSRMNTKYDENDKLIREVKVITLKSKLVSDFRKDFQFYKVREINNYHHAHDAYLNAVVGTALIKKYPKLESEFVYGDYKVYDVRKMIAKSEQEIGKATAKYFFYSNIMNFFKTEITLANGEIRKRPLIETNGETGEIVWDKGRDFATVRKVLSMPQVNIVKKTEVQTGGFSKESILPKRNSDKLIARKKDWDPKKYGGFDSPTVAYSVLVVAKVEKGKSKKLKSVKELLGITIMERSSFEKNPIDFLEAKGYKEVKKDLIIKLPKYSLFELENGRKRMLASAGELQKGNELALPSKYVNFLYLASHYEKLKGSPEDNEQKQLFVEQHKHYLDEIIEQISEFSKRVILADANLDKVLSAYNKHRDKPIREQAENIIHLFTLTNLGAPAAFKYFDTTIDRKRYTSTKEVLDATLIHQSITGLYETRIDLSQLGGDSGGSPKKKRKV

SEQ ID NO: 189 - protein, 1775 aa, Artificial Sequence
  Synthetic
MSEVEFSHEYWMRHALTLAKRAWDEREVPVGAVLVHNNRVIGEGWNRPIGRHDPTAHAEIMALRQGGLVMQNYRLIDATLYVTLEPCVMCAGAMIHSRIGRVVFGARDAKTGAAGSLMDVLHHPGMNHRVEITEGILADECAALLSDFFRMRRQEIKAQKKAQSSTDSGGSSGGSSGSETPGTSESATPESSGGSSGGSSEVEFSHEYWMRHALTLAKRARDEREVPVGAVLVLNNRVIGEGWNRAIGLHDPTAHAEIMALRQGGLVMQNYRLIDATLYVTFEPCVMCAGAMIHSRIGRVVFGVRNAKTGAAGSLMDVLHYPGMNHRVEITEGILADECAALLCYFFRMPRQVFNAQKKAQSSTDSGGSSGGSSGSETPGTSESATPESSGGSSGGSDKKYSIGLAIGTNSVGWAVITDEYKVPSKKFKVLGNTDRHSIKKNLIGALLFDSGETAEATRLKRTARRRYTRRKNRICYLQEIFSNEMAKVDDSFFHRLEESFLVEEDKKHERHPIFGNIVDEVAYHEKYPTIYHLRKKLVDSTDKADLRLIYLALAHMIKFRGHFLIEGDLNPDNSDVDKLFIQLVQTYNQLFEENPINASGVDAKAILSARLSKSRRLENLIAQLPGEKKNGLFGNLIALSLGLTPNFKSNFDLAEDAKLQLSKDTYDDDLDNLLAQIGDQYADLFLAAKNLSDAILLSDILRVNTEITKAPLSASMIKRYDEHHQDLTLLKALVRQQLPEKYKEIFFDQSKNGYAGYIDGGASQEEFYKFIKPILEKMDGTEELLVKLNREDLLRKQRTFDNGSIPHQIHLGELHAILRRQEDFYPFLKDNREKIEKILTFRIPYYVGPLARGNSRFAWMTRKSEETITPWNFEEVVDKGASAQSFIERMTNFDKNLPNEKVLPKHSLLYEYFTVYNELTKVKYVTEGMRKPAFLSGEQKKAIVDLLFKTNRKVTVKQLKEDYFKKIECFDSVEISGVEDRFNASLGTYHDLLKIIKDKDFLDNEENEDILEDIVLTLTLFEDREMIEERLKTYAHLFDDKVMKQLKRRRYTGWGRLSRKLINGIRDKQSGKTILDFLKSDGFANRNFMQLIHDDSLTFKEDIQKAQVSGQGDSLHEHIANLAGSPAIKKGILQTVKVVDELVKVMGRHKPENIVIEMARENQTTQKGQKNSRERMKRIEEGIKELGSQILKEHPVENTQLQNEKLYLYYLQNGRDMYVDQELDINRLSDYDVDHIVPQSFLKDDSIDNKVLTRSDKNRGKSDNVPSEEVVKKMKNYWRQLLNAKLITQRKFDNLTKAERGGLSELDKAGFIKRQLVETRQITKHVAQILDSRMNTKYDENDKLIREVKVITLKSKLVSDFRKDFQFYKVREINNYHHAHDAYLNAVVGTALIKKYPKLESEFVYGDYKVYDVRKMIAKSEQEIGKATAKYFFYSNIMNFFKTEITLANGEIRKRPLIETNGETGEIVWDKGRDFATVRKVLSMPQVNIVKKTEVQTGGFSKESILPKRNSDKLIARKKDWDPKKYGGFDSPTVAYSVLVVAKVEKGKSKKLKSVKELLGITIMERSSFEKNPIDFLEAKGYKEVKKDLIIKLPKYSLFELENGRKRMLASAGELQKGNELALPSKYVNFLYLASHYEKLKGSPEDNEQKQLFVEQHKHYLDEIIEQISEFSKRVILADANLDKVLSAYNKHRDKPIREQAENIIHLFTLTNLGAPAAFKYFDTTIDRKRYTSTKEVLDATLIHQSITGLYETRIDLSQLGGDSGGSPKKKRKV

SEQ ID NO: 190 - protein, 1775 aa, Artificial Sequence
  Synthetic
MSEVEFSHEYWMRHALTLAKRAWDEREVPVGAVLVHNNRVIGEGWNRPIGRHDPTAHAEIMALRQGGLVMQNYRLIDATLYVTLEPCVMCAGAMIHSRIGRVVFGARDAKTGAAGSLMDVLHHPGMNHRVEITEGILADECAALLSDFFRMRRQEIKAQKKAQSSTDSGGSSGGSSGSETPGTSESATPESSGGSSGGSSEVEFSHEYWMRHALTLAKRALDEREVPVGAVLVLNNRVIGEGWNRAIGLHDPTAHAEIMALRQGGLVMQNYRLIDATLYVTFEPCVMCAGAMIHSRIGRVVFGVRNAKTGAAGSLMDVLHYPGMNHRVEITEGILADECNALLCYFFRMRRQVFNAQKKAQSSTDSGGSSGGSSGSETPGTSESATPESSGGSSGGSDKKYSIGLAIGTNSVGWAVITDEYKVPSKKFKVLGNTDRHSIKKNLIGALLFDSGETAEATRLKRTARRRYTRRKNRICYLQEIFSNEMAKVDDSFFHRLEESFLVEEDKKHERHPIFGNIVDEVAYHEKYPTIYHLRKKLVDSTDKADLRLIYLALAHMIKFRGHFLIEGDLNPDNSDVDKLFIQLVQTYNQLFEENPINASGVDAKAILSARLSKSRRLENLIAQLPGEKKNGLFGNLIALSLGLTPNFKSNFDLAEDAKLQLSKDTYDDDLDNLLAQIGDQYADLFLAAKNLSDAILLSDILRVNTEITKAPLSASMIKRYDEHHQDLTLLKALVRQQLPEKYKEIFFDQSKNGYAGYIDGGASQEEFYKFIKPILEKMDGTEELLVKLNREDLLRKQRTFDNGSIPHQIHLGELHAILRRQEDFYPFLKDNREKIEKILTFRIPYYVGPLARGNSRFAWMTRKSEETITPWNFEEVVDKGASAQSFIERMTNFDKNLPNEKVLPKHSLLYEYFTVYNELTKVKYVTEGMRKPAFLSGEQKKAIVDLLFKTNRKVTVKQLKEDYFKKIECFDSVEISGVEDRFNASLGTYHDLLKIIKDKDFLDNEENEDILEDIVLTLTLFEDREMIEERLKTYAHLFDDKVMKQLKRRRYTGWGRLSRKLINGIRDKQSGKTILDFLKSDGFANRNFMQLIHDDSLTFKEDIQKAQVSGQGDSLHEHIANLAGSPAIKKGILQTVKVVDELVKVMGRHKPENIVIEMARENQTTQKGQKNSRERMKRIEEGIKELGSQILKEHPVENTQLQNEKLYLYYLQNGRDMYVDQELDINRLSDYDVDHIVPQSFLKDDSIDNKVLTRSDKNRGKSDNVPSEEVVKKMKNYWRQLLNAKLITQRKFDNLTKAERGGLSELDKAGFIKRQLVETRQITKHVAQILDSRMNTKYDENDKLIREVKVITLKSKLVSDFRKDFQFYKVREINNYHHAHDAYLNAVVGTALIKKYPKLESEFVYGDYKVYDVRKMIAKSEQEIGKATAKYFFYSNIMNFFKTEITLANGEIRKRPLIETNGETGEIVWDKGRDFATVRKVLSMPQVNIVKKTEVQTGGFSKESILPKRNSDKLIARKKDWDPKKYGGFDSPTVAYSVLVVAKVEKGKSKKLKSVKELLGITIMERSSFEKNPIDFLEAKGYKEVKKDLIIKLPKYSLFELENGRKRMLASAGELQKGNELALPSKYVNFLYLASHYEKLKGSPEDNEQKQLFVEQHKHYLDEIIEQISEFSKRVILADANLDKVLSAYNKHRDKPIREQAENIIHLFTLTNLGAPAAFKYFDTTIDRKRYTSTKEVLDATLIHQSITGLYETRIDLSQLGGDSGGSPKKKRKV

SEQ ID NO: 191 - protein, 1775 aa, Artificial Sequence
  Synthetic
MSEVEFSHEYWMRHALTLAKRAWDEREVPVGAVLVHNNRVIGEGWNRPIGRHDPTAHAEIMALRQGGLVMQNYRLIDATLYVTLEPCVMCAGAMIHSRIGRVVFGARDAKTGAAGSLMDVLHHPGMNHRVEITEGILADECAALLSDFFRMRRQEIKAQKKAQSSTDSGGSSGGSSGSETPGTSESATPESSGGSSGGSSEVEFSHEYWMRHALTLAKRALDEREVPVGAVLVLNNRVIGEGWNRAIGLHDPTAHAEIMALRQGGLVMQNYRLIDATLYVTFEPCVMCAGAMIHSRIGRVVFGVRNAKTGAAGSLMDVLHYPGMNHRVEITEGILADECNALLCYFFRMPRQVFNAQKKAQSSTDSGGSSGGSSGSETPGTSESATPESSGGSSGGSDKKYSIGLAIGTNSVGWAVITDEYKVPSKKFKVLGNTDRHSIKKNLIGALLFDSGETAEATRLKRTARRRYTRRKNRICYLQEIFSNEMAKVDDSFFHRLEESFLVEEDKKHERHPIFGNIVDEVAYHEKYPTIYHLRKKLVDSTDKADLRLIYLALAHMIKFRGHFLIEGDLNPDNSDVDKLFIQLVQTYNQLFEENPINASGVDAKAILSARLSKSRRLENLIAQLPGEKKNGLFGNLIALSLGLTPNFKSNFDLAEDAKLQLSKDTYDDDLDNLLAQIGDQYADLFLAAKNLSDAILLSDILRVNTEITKAPLSASMIKRYDEHHQDLTLLKALVRQQLPEKYKEIFFDQSKNGYAGYIDGGASQEEFYKFIKPILEKMDGTEELLVKLNREDLLRKQRTFDNGSIPHQIHLGELHAILRRQEDFYPFLKDNREKIEKILTFRIPYYVGPLARGNSRFAWMTRKSEETITPWNFEEVVDKGASAQSFIERMTNFDKNLPNEKVLPKHSLLYEYFTVYNELTKVKYVTEGMRKPAFLSGEQKKAIVDLLFKTNRKVTVKQLKEDYFKKIECFDSVEISGVEDRFNASLGTYHDLLKIIKDKDFLDNEENEDILEDIVLTLTLFEDREMIEERLKTYAHLFDDKVMKQLKRRRYTGWGRLSRKLINGIRDKQSGKTILDFLKSDGFANRNFMQLIHDDSLTFKEDIQKAQVSGQGDSLHEHIANLAGSPAIKKGILQTVKVVDELVKVMGRHKPENIVIEMARENQTTQKGQKNSRERMKRIEEGIKELGSQILKEHPVENTQLQNEKLYLYYLQNGRDMYVDQELDINRLSDYDVDHIVPQSFLKDDSIDNKVLTRSDKNRGKSDNVPSEEVVKKMKNYWRQLLNAKLITQRKFDNLTKAERGGLSELDKAGFIKRQLVETRQITKHVAQILDSRMNTKYDENDKLIREVKVITLKSKLVSDFRKDFQFYKVREINNYHHAHDAYLNAVVGTALIKKYPKLESEFVYGDYKVYDVRKMIAKSEQEIGKATAKYFFYSNIMNFFKTEITLANGEIRKRPLIETNGETGEIVWDKGRDFATVRKVLSMPQVNIVKKTEVQTGGFSKESILPKRNSDKLIARKKDWDPKKYGGFDSPTVAYSVLVVAKVEKGKSKKLKSVKELLGITIMERSSFEKNPIDFLEAKGYKEVKKDLIIKLPKYSLFELENGRKRMLASAGELQKGNELALPSKYVNFLYLASHYEKLKGSPEDNEQKQLFVEQHKHYLDEIIEQISEFSKRVILADANLDKVLSAYNKHRDKPIREQAENIIHLFTLTNLGAPAAFKYFDTTIDRKRYTSTKEVLDATLIHQSITGLYETRIDLSQLGGDSGGSPKKKRKV

SEQ ID NO: 192 - protein, 1775 aa, Artificial Sequence; identical to SEQ ID NO: 189
  Synthetic

SEQ ID NO: 193 - protein, 1767 aa, Artificial Sequence
  Synthetic
MSEVEFSHEYWMRHALTLAKRAWDEREVPVGAVLVHNNRVIGEGWNRPIGRHDPTAHAEIMALRQGGLVMQNYRLIDATLYVTLEPCVMCAGAMIHSRIGRVVFGARDAKTGAAGSLMDVLHHPGMNHRVEITEGILADECAALLSDFFRMRRQEIKAQKKAQSSTDSGGSSGGSSGSETPGTSESATPESSGGSSGGSSEVEFSHEYWMRHALTLAKRAWDEREVPVGAVLVLNNRVIGEGWNRAIGLHDPTAHAEIMALRQGGLVMQNYRLIDATLYVTFEPCVMCAGAMIHSRIGRVVFGVRNAKTGAAGSLMDVLHYPGMNHRVEITEGILADECAALLCYFFRMPRQVFNAQKKAQSSTDSGGSSGGSSGSETPGTSESATPESDKKYSIGLAIGTNSVGWAVITDEYKVPSKKFKVLGNTDRHSIKKNLIGALLFDSGETAEATRLKRTARRRYTRRKNRICYLQEIFSNEMAKVDDSFFHRLEESFLVEEDKKHERHPIFGNIVDEVAYHEKYPTIYHLRKKLVDSTDKADLRLIYLALAHMIKFRGHFLIEGDLNPDNSDVDKLFIQLVQTYNQLFEENPINASGVDAKAILSARLSKSRRLENLIAQLPGEKKNGLFGNLIALSLGLTPNFKSNFDLAEDAKLQLSKDTYDDDLDNLLAQIGDQYADLFLAAKNLSDAILLSDILRVNTEITKAPLSASMIKRYDEHHQDLTLLKALVRQQLPEKYKEIFFDQSKNGYAGYIDGGASQEEFYKFIKPILEKMDGTEELLVKLNREDLLRKQRTFDNGSIPHQIHLGELHAILRRQEDFYPFLKDNREKIEKILTFRIPYYVGPLARGNSRFAWMTRKSEETITPWNFEEVVDKGASAQSFIERMTNFDKNLPNEKVLPKHSLLYEYFTVYNELTKVKYVTEGMRKPAFLSGEQKKAIVDLLFKTNRKVTVKQLKEDYFKKIECFDSVEISGVEDRFNASLGTYHDLLKIIKDKDFLDNEENEDILEDIVLTLTLFEDREMIEERLKTYAHLFDDKVMKQLKRRRYTGWGRLSRKLINGIRDKQSGKTILDFLKSDGFANRNFMQLIHDDSLTFKEDIQKAQVSGQGDSLHEHIANLAGSPAIKKGILQTVKVVDELVKVMGRHKPENIVIEMARENQTTQKGQKNSRERMKRIEEGIKELGSQILKEHPVENTQLQNEKLYLYYLQNGRDMYVDQELDINRLSDYDVDHIVPQSFLKDDSIDNKVLTRSDKNRGKSDNVPSEEVVKKMKNYWRQLLNAKLITQRKFDNLTKAERGGLSELDKAGFIKRQLVETRQITKHVAQILDSRMNTKYDENDKLIREVKVITLKSKLVSDFRKDFQFYKVREINNYHHAHDAYLNAVVGTALIKKYPKLESEFVYGDYKVYDVRKMIAKSEQEIGKATAKYFFYSNIMNFFKTEITLANGEIRKRPLIETNGETGEIVWDKGRDFATVRKVLSMPQVNIVKKTEVQTGGFSKESILPKRNSDKLIARKKDWDPKKYGGFDSPTVAYSVLVVAKVEKGKSKKLKSVKELLGITIMERSSFEKNPIDFLEAKGYKEVKKDLIIKLPKYSLFELENGRKRMLASAGELQKGNELALPSKYVNFLYLASHYEKLKGSPEDNEQKQLFVEQHKHYLDEIIEQISEFSKRVILADANLDKVLSAYNKHRDKPIREQAENIIHLFTLTNLGAPAAFKYFDTTIDRKRYTSTKEVLDATLIHQSITGLYETRIDLSQLGGDSGGSPKKKRKV

SEQ ID NO: 194 - protein, 1767 aa, Artificial Sequence
  Synthetic
MSEVEFSHEYWMRHALTLAKRAWDEREVPVGAVLVHNNRVIGEGWNRPIGRHDPTAHAEIMALRQGGLVMQNYRLIDATLYVTLEPCVMCAGAMIHSRIGRVVFGARDAKTGAAGSLMDVLHHPGMNHRVEITEGILADECAALLSDFFRMRRQEIKAQKKAQSSTDSGGSSGGSSGSETPGTSESATPESSGGSSGGSSEVEFSHEYWMRHALTLAKRAWDEREVPVGAVLVLNNRVIGEGWNRAIGLHDPTAHAEIMALRQGGLVMQNYRLIDATLYVTFEPCVMCAGAMIHSRIGRVVFGVRNAKTGAAGSLMDVLHYPGMNHRVEITEGILADECNALLCYFFRMPRQVFNAQKKAQSSTDSGGSSGGSSGSETPGTSESATPESDKKYSIGLAIGTNSVGWAVITDEYKVPSKKFKVLGNTDRHSIKKNLIGALLFDSGETAEATRLKRTARRRYTRRKNRICYLQEIFSNEMAKVDDSFFHRLEESFLVEEDKKHERHPIFGNIVDEVAYHEKYPTIYHLRKKLVDSTDKADLRLIYLALAHMIKFRGHFLIEGDLNPDNSDVDKLFIQLVQTYNQLFEENPINASGVDAKAILSARLSKSRRLENLIAQLPGEKKNGLFGNLIALSLGLTPNFKSNFDLAEDAKLQLSKDTYDDDLDNLLAQIGDQYADLFLAAKNLSDAILLSDILRVNTEITKAPLSASMIKRYDEHHQDLTLLKALVRQQLPEKYKEIFFDQSKNGYAGYIDGGASQEEFYKFIKPILEKMDGTEELLVKLNREDLLRKQRTFDNGSIPHQIHLGELHAILRRQEDFYPFLKDNREKIEKILTFRIPYYVGPLARGNSRFAWMTRKSEETITPWNFEEVVDKGASAQSFIERMTNFDKNLPNEKVLPKHSLLYEYFTVYNELTKVKYVTEGMRKPAFLSGEQKKAIVDLLFKTNRKVTVKQLKEDYFKKIECFDSVEISGVEDRFNASLGTYHDLLKIIKDKDFLDNEENEDILEDIVLTLTLFEDREMIEERLKTYAHLFDDKVMKQLKRRRYTGWGRLSRKLINGIRDKQSGKTILDFLKSDGFANRNFMQLIHDDSLTFKEDIQKAQVSGQGDSLHEHIANLAGSPAIKKGILQTVKVVDELVKVMGRHKPENIVIEMARENQTTQKGQKNSRERMKRIEEGIKELGSQILKEHPVENTQLQNEKLYLYYLQNGRDMYVDQELDINRLSDYDVDHIVPQSFLKDDSIDNKVLTRSDKNRGKSDNVPSEEVVKKMKNYWRQLLNAKLITQRKFDNLTKAERGGLSELDKAGFIKRQLVETRQITKHVAQILDSRMNTKYDENDKLIREVKVITLKSKLVSDFRKDFQFYKVREINNYHHAHDAYLNAVVGTALIKKYPKLESEFVYGDYKVYDVRKMIAKSEQEIGKATAKYFFYSNIMNFFKTEITLANGEIRKRPLIETNGETGEIVWDKGRDFATVRKVLSMPQVNIVKKTEVQTGGFSKESILPKRNSDKLIARKKDWDPKKYGGFDSPTVAYSVLVVAKVEKGKSKKLKSVKELLGITIMERSSFEKNPIDFLEAKGYKEVKKDLIIKLPKYSLFELENGRKRMLASAGELQKGNELALPSKYVNFLYLASHYEKLKGSPEDNEQKQLFVEQHKHYLDEIIEQISEFSKRVILADANLDKVLSAYNKHRDKPIREQAENIIHLFTLTNLGAPAAFKYFDTTIDRKRYTSTKEVLDATLIHQSITGLYETRIDLSQLGGDSGGSPKKKRKV

SEQ ID NO: 195 - protein, 1767 aa, Artificial Sequence
  Synthetic
MSEVEFSHEYWMRHALTLAKRAWDEREVPVGAVLVHNNRVIGEGWNRPIGRHDPTAHAEIMALRQGGLVMQNYRLIDATLYVTLEPCVMCAGAMIHSRIGRVVFGARDAKTGAAGSLMDVLHHPGMNHRVEITEGILADECAALLSDFFRMRRQEIKAQKKAQSSTDSGGSSGGSSGSETPGTSESATPESSGGSSGGSSEVEFSHEYWMRHALTLAKRALDEREVPVGAVLVLNNRVIGEGWNRAIGLHDPTAHAEIMALRQGGLVMQNYRLIDATLYVTFEPCVMCAGAMIHSRIGRVVFGVRNAKTGAAGSLMDVLHYPGMNHRVEITEGILADECAALLCYFFRMPRQVFNAQKKAQSSTDSGGSSGGSSGSETPGTSESATPESDKKYSIGLAIGTNSVGWAVITDEYKVPSKKFKVLGNTDRHSIKKNLIGALLFDSGETAEATRLKRTARRRYTRRKNRICYLQEIFSNEMAKVDDSFFHRLEESFLVEEDKKHERHPIFGNIVDEVAYHEKYPTIYHLRKKLVDSTDKADLRLIYLALAHMIKFRGHFLIEGDLNPDNSDVDKLFIQLVQTYNQLFEENPINASGVDAKAILSARLSKSRRLENLIAQLPGEKKNGLFGNLIALSLGLTPNFKSNFDLAEDAKLQLSKDTYDDDLDNLLAQIGDQYADLFLAAKNLSDAILLSDILRVNTEITKAPLSASMIKRYDEHHQDLTLLKALVRQQLPEKYKEIFFDQSKNGYAGYIDGGASQEEFYKFIKPILEKMDGTEELLVKLNREDLLRKQRTFDNGSIPHQIHLGELHAILRRQEDFYPFLKDNREKIEKILTFRIPYYVGPLARGNSRFAWMTRKSEETITPWNFEEVVDKGASAQSFIERMTNFDKNLPNEKVLPKHSLLYEYFTVYNELTKVKYVTEGMRKPAFLSGEQKKAIVDLLFKTNRKVTVKQLKEDYFKKIECFDSVEISGVEDRFNASLGTYHDLLKIIKDKDFLDNEENEDILEDIVLTLTLFEDREMIEERLKTYAHLFDDKVMKQLKRRRYTGWGRLSRKLINGIRDKQSGKTILDFLKSDGFANRNFMQLIHDDSLTFKEDIQKAQVSGQGDSLHEHIANLAGSPAIKKGILQTVKVVDELVKVMGRHKPENIVIEMARENQTTQKGQKNSRERMKRIEEGIKELGSQILKEHPVENTQLQNEKLYLYYLQNGRDMYVDQELDINRLSDYDVDHIVPQSFLKDDSIDNKVLTRSDKNRGKSDNVPSEEVVKKMKNYWRQLLNAKLITQRKFDNLTKAERGGLSELDKAGFIKRQLVETRQITKHVAQILDSRMNTKYDENDKLIREVKVITLKSKLVSDFRKDFQFYKVREINNYHHAHDAYLNAVVGTALIKKYPKLESEFVYGDYKVYDVRKMIAKSEQEIGKATAKYFFYSNIMNFFKTEITLANGEIRKRPLIETNGETGEIVWDKGRDFATVRKVLSMPQVNIVKKTEVQTGGFSKESILPKRNSDKLIARKKDWDPKKYGGFDSPTVAYSVLVVAKVEKGKSKKLKSVKELLGITIMERSSFEKNPIDFLEAKGYKEVKKDLIIKLPKYSLFELENGRKRMLASAGELQKGNELALPSKYVNFLYLASHYEKLKGSPEDNEQKQLFVEQHKHYLDEIIEQISEFSKRVILADANLDKVLSAYNKHRDKPIREQAENIIHLFTLTNLGAPAAFKYFDTTIDRKRYTSTKEVLDATLIHQSITGLYETRIDLSQLGGDSGGSPKKKRKV

SEQ ID NO: 196 - protein, 1775 aa, Artificial Sequence; identical to SEQ ID NO: 185
  Synthetic

SEQ ID NO: 197 - protein, 1775 aa, Artificial Sequence; identical to SEQ ID NO: 186
  Synthetic

SEQ ID NO: 198 - protein, 1776 aa, Artificial Sequence
  Synthetic
MSEVEFSHEYWMRHALTLAKRAWDEREVPVGAVLVHNNRVIGEGWNRPIGRHDPTAHAEIMALRQGGLVMQNYRLIDATLYVTLEPCVMCAGAMIHSRIGRVVFGARDAKTGAAGSLMDVLHHPGMNHRVEITEGILADECAALLSDFFRMRRQEIKAQKKAQSSTDSGGSSGGSSGSETPGTSESATPESSGGSSGGSSEVEFSHEYWMRHALTLAKRALDEREVPVGAVLVLNNRVIGEGWNRAIGLHDPTAHAEIMALRQGGLVMQNYRLIDATLYVTFEPCVMCAGAMIHSRIGRVVFGVRNAKTGAAGSLMDVLHYPGMNHRVEITEGILADECNALLCYFFRMRRQVFNAQKKAQSSTDSGGSSGGSSGSETPGTSESATPESSGGSSGGSDKKYSIGLAIGTNSVGWAVITDEYKVPSKKFKVLGNTDRHSIKKNLIGALLFDSGETAEATRLKRTARRRYTRRKNRICYLQEIFSNEMAKVDDSFFHRLEESFLVEEDKKHERHPIFGNIVDEVAYHEKYPTIYHLRKKLVDSTDKADLRLIYLALAHMIKFRGHFLIEGDLNPDNSDVDKLFIQLVQTYNQLFEENPINASGVDAKAILSARLSKSRRLENLIAQLPGEKKNGLFGNLIALSLGLTPNFKSNFDLAEDAKLQLSKDTYDDDLDNLLAQIGDQYADLFLAAKNLSDAILLSDILRVNTEITKAPLSASMIKRYDEHHQDLTLLKALVRQQLPEKYKEIFFDQSKNGYAGYIDGGASQEEFYKFIKPILEKMDGTEELLVKLNREDLLRKQRTFDNGSIPHQIHLGELHAILRRQEDFYPFLKDNREKIEKILTFRIPYYVGPLARGNSRFAWMTRKSEETITPWNFEEVVDKGASAQSFIERMTNFDKNLPNEKVLPKHSLLYEYFTVYNELTKVKYVTEGMRKPAFLSGEQKKAIVDLLFKTNRKVTVKQLKEDYFKKIECFDSVEISGVEDRFNASLGTYHDLLKIIKDKDFLDNEENEDILEDIVLTLTLFEDREMIEERLKTYAHLFDDKVMKQLKRRRYTGWGRLSRKLINGIRDKQSGKTILDFLKSDGFANRNFMQLIHDDSLTFKEDIQKAQVSGQGDSLHEHIANLAGSPAIKKGILQTVKVVDELVKVMGRHKPENIVIEMARENQTTQKGQKNSRERMKRIEEGIKELGSQILKEHPVENTQLQNEKLYLYYLQNGRDMYVDQELDINRLSDYDVDHIVPQSFLKDDSIDNKVLTRSDKNRGKSDNVPSEEVVKKMKNYWRQLLNAKLITQRKFDNLTKAERGGLSELDKAGFIKRQLVETRQITKHVAQILDSRMNTKYDENDKLIREVKVITLKSKLVSDFRKDFQFYKVREINNYHHAHDAYLNAVVGTALIKKYPKLESEFVYGDYKVYDVRKMIAKSEQEIGKATAKYFFYSNIMNFFKTEITLANGEIRKRPLIETNGETGEIVWDKGRDFATVRKVLSMPQVNIVKKTEVQTGGFSKESILPKRNSDKLIARKKDWDPKKYGGFDSPTVAYSVLVVAKVEKGKSKKLKSVKELLGITIMERSSFEKNPIDFLEAKGYKEVKKDLIIKLPKYSLFELENGRKRMLASAGELQKGNELALPSKYVNFLYLASHYEKLKGSPEDNEQKQLFVEQHKHYLDEIIEQISEFSKRVILADANLDKVLSAYNKHRDKPIREQAENIIHLFTLTNLGAPAAFKYFDTTIDRKRYTSTKEVLDATLIHQSITGLYETRIDLSQLGGDSGGSPKKKRKVC

SEQ ID NO: 199 - protein, 1773 aa, Artificial Sequence
  Synthetic
MSEVEFSHEYWMRHALTLAKRAWDEREVPVGAVLVHNNRVIGEGWNRPIGRHDPTAHAEIMALRQGGLVMQNYRLIDATLYVTLEPCVMCAGAMIHSRIGRVVFGARDAKTGAAGSLMDVLHHPGMNHRVEITEGILADECAALLSDFFRMRRQEIKAQKKAQSSTDSGGSSGGSSGSETPGTSESATPESSGGSSGGSSEVEFSHEYWMRHALTLAKRALDEREVPVGAVLVLNNRGEGWNRAIGLHDPTAHAEIMALRQGGLVMQNYRLIDATLYVTFEPCVMCAGAMIHSRIGRVVFGVRNAKTGAAGSLMDVLHYPGMNHRVEITEGILADECNALLCYFFRMPRQVFNAQKKAQSSTDSGGSSGGSSGSETPGTSESATPESSGGSSGGSDKKYSIGLAIGTNSVGWAVITDEYKVPSKKFKVLGNTDRHSIKKNLIGALLFDSGETAEATRLKRTARRRYTRRKNRICYLQEIFSNEMAKVDDSFFHRLEESFLVEEDKKHERHPIFGNIVDEVAYHEKYPTIYHLRKKLVDSTDKADLRLIYLALAHMIKFRGHFLIEGDLNPDNSDVDKLFIQLVQTYNQLFEENPINASGVDAKAILSARLSKSRRLENLIAQLPGEKKNGLFGNLIALSLGLTPNFKSNFDLAEDAKLQLSKDTYDDDLDNLLAQIGDQYADLFLAAKNLSDAILLSDILRVNTEITKAPLSASMIKRYDEHHQDLTLLKALVRQQLPEKYKEIFFDQSKNGYAGYIDGGASQEEFYKFIKPILEKMDGTEELLVKLNREDLLRKQRTFDNGSIPHQIHLGELHAILRRQEDFYPFLKDNREKIEKILTFRIPYYVGPLARGNSRFAWMTRKSEETITPWNFEEVVDKGASAQSFIERMTNFDKNLPNEKVLPKHSLLYEYFTVYNELTKVKYVTEGMRKPAFLSGEQKKAIVDLLFKTNRKVTVKQLKEDYFKKIECFDSVEISGVEDRFNASLGTYHDLLKIIKDKDFLDNEENEDILEDIVLTLTLFEDREMIEERLKTYAHLFDDKVMKQLKRRRYTGWGRLSRKLINGIRDKQSGKTILDFLKSDGFANRNFMQLIHDDSLTFKEDIQKAQVSGQGDSLHEHIANLAGSPAIKKGILQTVKVVDELVKVMGRHKPENIVIEMARENQTTQKGQKNSRERMKRIEEGIKELGSQILKEHPVENTQLQNEKLYLYYLQNGRDMYVDQELDINRLSDYDVDHIVPQSFLKDDSIDNKVLTRSDKNRGKSDNVPSEEVVKKMKNYWRQLLNAKLITQRKFDNLTKAERGGLSELDKAGFIKRQLVETRQITKHVAQILDSRMNTKYDENDKLIREVKVITLKSKLVSDFRKDFQFYKVREINNYHHAHDAYLNAVVGTALIKKYPKLESEFVYGDYKVYDVRKMIAKSEQEIGKATAKYFFYSNIMNFFKTEITLANGEIRKRPLIETNGETGEIVWDKGRDFATVRKVLSMPQVNIVKKTEVQTGGFSKESILPKRNSDKLIARKKDWDPKKYGGFDSPTVAYSVLVVAKVEKGKSKKLKSVKELLGITIMERSSFEKNPIDFLEAKGYKEVKKDLIIKLPKYSLFELENGRKRMLASAGELQKGNELALPSKYVNFLYLASHYEKLKGSPEDNEQKQLFVEQHKHYLDEIIEQISEFSKRVILADANLDKVLSAYNKHRDKPIREQAENIIHLFTLTNLGAPAAFKYFDTTIDRKRYTSTKEVLDATLIHQSITGLYETRIDLSQLGGDSGGSPKKKRKV

SEQ ID NO: 200 - protein, 1775 aa, Artificial Sequence; identical to SEQ ID NO: 189
  Synthetic

SEQ ID NO: 201 - protein, 1803 aa, Artificial Sequence
  Synthetic
MKRTADGSEFESPKKKRKVSEVEFSHEYWMRHALTLAKRAWDEREVPVGAVLVHNNRVIGEGWNRPIGRHDPTAHAEIMALRQGGLVMQNYRLIDATLYVTLEPCVMCAGAMIHSRIGRVVFGARDAKTGAAGSLMDVLHHPGMNHRVEITEGILADECAALLSDFFRMRRQEIKAQKKAQSSTDSGGSSGGSSGSETPGTSESATPESSGGSSGGSSEVEFSHEYWMRHALTLAKRARDEREVPVGAVLVLNNRVIGEGWNRAIGLHDPTAHAEIMALRQGGLVMQNYRLIDATLYVTFEPCVMCAGAMIHSRIGRVVFGVRNAKTGAAGSLMDVLHYPGMNHRVEITEGILADECAALLCYFFRMPRQVFNAQKKAQSSTDSGGSSGGSSGSETPGTSESATPESSGGSSGGSDKKYSIGLAIGTNSVGWAVITDEYKVPSKKFKVLGNTDRHSIKKNLIGALLFDSGETAEATRLKRTARRRYTRRKNRICYLQEIFSNEMAKVDDSFFHRLEESFLVEEDKKHERHPIFGNIVDEVAYHEKYPTIYHLRKKLVDSTDKADLRLIYLALAHMIKFRGHFLIEGDLNPDNSDVDKLFIQLVQTYNQLFEENPINASGVDAKAILSARLSKSRRLENLIAQLPGEKKNGLFGNLIALSLGLTPNFKSNFDLAEDAKLQLSKDTYDDDLDNLLAQIGDQYADLFLAAKNLSDAILLSDILRVNTEITKAPLSASMIKRYDEHHQDLTLLKALVRQQLPEKYKEIFFDQSKNGYAGYIDGGASQEEFYKFIKPILEKMDGTEELLVKLNREDLLRKQRTFDNGSIPHQIHLGELHAILRRQEDFYPFLKDNREKIEKILTFRIPYYVGPLARGNSRFAWMTRKSEETITPWNFEEVVDKGASAQSFIERMTNFDKNLPNEKVLPKHSLLYEYFTVYNELTKVKYVTEGMRKPAFLSGEQKKAIVDLLFKTNRKVTVKQLKEDYFKKIECFDSVEISGVEDRFNASLGTYHDLLKIIKDKDFLDNEENEDILEDIVLTLTLFEDREMIEERLKTYAHLFDDKVMKQLKRRRYTGWGRLSRKLINGIRDKQSGKTILDFLKSDGFANRNFMQLIHDDSLTFKEDIQKAQVSGQGDSLHEHIANLAGSPAIKKGILQTVKVVDELVKVMGRHKPENIVIEMARENQTTQKGQKNSRERMKRIEEGIKELGSQILKEHPVENTQLQNEKLYLYYLQNGRDMYVDQELDINRLSDYDVDHIVPQSFLKDDSIDNKVLTRSDKNRGKSDNVPSEEVVKKMKNYWRQLLNAKLITQRKFDNLTKAERGGLSELDKAGFIKRQLVETRQITKHVAQILDSRMNTKYDENDKLIREVKVITLKSKLVSDFRKDFQFYKVREINNYHHAHDAYLNAVVGTALIKKYPKLESEFVYGDYKVYDVRKMIAKSEQEIGKATAKYFFYSNIMNFFKTEITLANGEIRKRPLIETNGETGEIVWDKGRDFATVRKVLSMPQVNIVKKTEVQTGGFSKESILPKRNSDKLIARKKDWDPKKYGGFVSPTVAYSVLVVAKVEKGKSKKLKSVKELLGITIMERSSFEKNPIDFLEAKGYKEVKKDLIIKLPKYSLFELENGRKRMLASARELQKGNELALPSKYVNFLYLASHYEKLKGSPEDNEQKQLFVEQHKHYLDEIIEQISEFSKRVILADANLDKVLSAYNKHRDKPIREQAENIIHLFTLTNLGAPAAFKYFDTTIDRKQYRSTKEVLDATLIHQSITGLYETRIDLSQLGGDSGGSKRTADGSEFEPKKKRKV

SEQ ID NO: 202 - protein, 1605 aa, Artificial Sequence
  Synthetic
MKRTADGSEFESPKKKRKVSEVEFSHEYWMRHALTLAKRARDEREVPVGAVLVLNNRVIGEGWNRAIGLHDPTAHAEIMALRQGGLVMQNYRLIDATLYVTFEPCVMCAGAMIHSRIGRVVFGVRNSKRGAAGSLMNVLNYPGMNHRVEITEGILADECAALLCDFYRMPRQVFNAQKKAQSSINSGGSSGGSSGSETPGTSESATPESSGGSSGGSDKKYSIGLAIGTNSVGWAVITDEYKVPSKKFKVLGNTDRHSIKKNLIGALLFDSGETAEATRLKRTARRRYTRRKNRICYLQEIFSNEMAKVDDSFFHRLEESFLVEEDKKHERHPIFGNIVDEVAYHEKYPTIYHLRKKLVDSTDKADLRLIYLALAHMIKFRGHFLIEGDLNPDNSDVDKLFIQLVQTYNQLFEENPINASGVDAKAILSARLSKSRRLENLIAQLPGEKKNGLFGNLIALSLGLTPNFKSNFDLAEDAKLQLSKDTYDDDLDNLLAQIGDQYADLFLAAKNLSDAILLSDILRVNTEITKAPLSASMIKRYDEHHQDLTLLKALVRQQLPEKYKEIFFDQSKNGYAGYIDGGASQEEFYKFIKPILEKMDGTEELLVKLNREDLLRKQRTFDNGSIPHQIHLGELHAILRRQEDFYPFLKDNREKIEKILTFRIPYYVGPLARGNSRFAWMTRKSEETITPWNFEEVVDKGASAQSFIERMTNFDKNLPNEKVLPKHSLLYEYFTVYNELTKVKYVTEGMRKPAFLSGEQKKAIVDLLFKTNRKVTVKQLKEDYFKKIECFDSVEISGVEDRFNASLGTYHDLLKIIKDKDFLDNEENEDILEDIVLTLTLFEDREMIEERLKTYAHLFDDKVMKQLKRRRYTGWGRLSRKLINGIRDKQSGKTILDFLKSDGFANRNFMQLIHDDSLTFKEDIQKAQVSGQGDSLHEHIANLAGSPAIKKGILQTVKVVDELVKVMGRHKPENIVIEMARENQTTQKGQKNSRERMKRIEEGIKELGSQILKEHPVENTQLQNEKLYLYYLQNGRDMYVDQELDINRLSDYDVDHIVPQSFLKDDSIDNKVLTRSDKNRGKSDNVPSEEVVKKMKNYWRQLLNAKLITQRKFDNLTKAERGGLSELDKAGFIKRQLVETRQITKHVAQILDSRMNTKYDENDKLIREVKVITLKSKLVSDFRKDFQFYKVREINNYHHAHDAYLNAVVGTALIKKYPKLESEFVYGDYKVYDVRKMIAKSEQEIGKATAKYFFYSNIMNFFKTEITLANGEIRKRPLIETNGETGEIVWDKGRDFATVRKVLSMPQVNIVKKTEVQTGGFSKESILPKRNSDKLIARKKDWDPKKYGGFDSPTVAYSVLVVAKVEKGKSKKLKSVKELLGITIMERSSFEKNPIDFLEAKGYKEVKKDLIIKLPKYSLFELENGRKRMLASAGELQKGNELALPSKYVNFLYLASHYEKLKGSPEDNEQKQLFVEQHKHYLDEIIEQISEFSKRVILADANLDKVLSAYNKHRDKPIREQAENIIHLFTLTNLGAPAAFKYFDTTIDRKRYTSTKEVLDATLIHQSITGLYETRIDLSQLGGDSGGSKRTADGSEFEPKKKRKV

SEQ ID NO: 203 - protein, 1803 aa, Artificial Sequence
  Synthetic
MKRTADGSEFESPKKKRKVSEVEFSHEYWMRHALTLAKRAWDEREVPVGAVLVHNNRVIGEGWNRPIGRHDPTAHAEIMALRQGGLVMQNYRLIDATLYVTLEPCVMCAGAMIHSRIGRVVFGARDAKTGAAGSLMDVLHHPGMNHRVEITEGILADECAALLSDFFRMRRQEIKAQKKAQSSTDSGGSSGGSSGSETPGTSESATPESSGGSSGGSSEVEFSHEYWMRHALTLAKRARDEREVPVGAVLVLNNRVIGEGWNRAIGLHDPTAHAEIMALRQGGLVMQNYRLIDATLYVTFEPCVMCAGAMIHSRIGRVVFGVRNSKRGAAGSLMNVLNYPGMNHRVEITEGILADECAALLCDFYRMPRQVFNAQKKAQSSINSGGSSGGSSGSETPGTSESATPESSGGSSGGSDKKYSIGLAIGTNSVGWAVITDEYKVPSKKFKVLGNTDRHSIKKNLIGALLFDSGETAEATRLKRTARRRYTRRKNRICYLQEIFSNEMAKVDDSFFHRLEESFLVEEDKKHERHPIFGNIVDEVAYHEKYPTIYHLRKKLVDSTDKADLRLIYLALAHMIKFRGHFLIEGDLNPDNSDVDKLFIQLVQTYNQLFEENPINASGVDAKAILSARLSKSRRLENLIAQLPGEKKNGLFGNLIALSLGLTPNFKSNFDLAEDAKLQLSKDTYDDDLDNLLAQIGDQYADLFLAAKNLSDAILLSDILRVNTEITKAPLSASMIKRYDEHHQDLTLLKALVRQQLPEKYKEIFFDQSKNGYAGYIDGGASQEEFYKFIKPILEKMDGTEELLVKLNREDLLRKQRTFDNGSIPHQIHLGELHAILRRQEDFYPFLKDNREKIEKILTFRIPYYVGPLARGNSRFAWMTRKSEETITPWNFEEVVDKGASAQSFIERMTNFDKNLPNEKVLPKHSLLYEYFTVYNELTKVKYVTEGMRKPAFLSGEQKKAIVDLLFKTNRKVTVKQLKEDYFKKIECFDSVEISGVEDRFNASLGTYHDLLKIIKDKDFLDNEENEDILEDIVLTLTLFEDREMIEERLKTYAHLFDDKVMKQLKRRRYTGWGRLSRKLINGIRDKQSGKTILDFLKSDGFANRNFMQLIHDDSLTFKEDIQKAQVSGQGDSLHEHIANLAGSPAIKKGILQTVKVVDELVKVMGRHKPENIVIEMARENQTTQKGQKNSRERMKRIEEGIKELGSQILKEHPVENTQLQNEKLYLYYLQNGRDMYVDQELDINRLSDYDVDHIVPQSFLKDDSIDNKVLTRSDKNRGKSDNVPSEEVVKKMKNYWRQLLNAKLITQRKFDNLTKAERGGLSELDKAGFIKRQLVETRQITKHVAQILDSRMNTKYDENDKLIREVKVITLKSKLVSDFRKDFQFYKVREINNYHHAHDAYLNAVVGTALIKKYPKLESEFVYGDYKVYDVRKMIAKSEQEIGKATAKYFFYSNIMNFFKTEITLANGEIRKRPLIETNGETGEIVWDKGRDFATVRKVLSMPQVNIVKKTEVQTGGFSKESILPKRNSDKLIARKKDWDPKKYGGFDSPTVAYSVLVVAKVEKGKSKKLKSVKELLGITIMERSSFEKNPIDFLEAKGYKEVKKDLIIKLPKYSLFELENGRKRMLASAGELQKGNELALPSKYVNFLYLASHYEKLKGSPEDNEQKQLFVEQHKHYLDEIIEQISEFSKRVILADANLDKVLSAYNKHRDKPIREQAENIIHLFTLTNLGAPAAFKYFDTTIDRKRYTSTKEVLDATLIHQSITGLYETRIDLSQLGGDSGGSKRTADGSEFEPKKKRKV

SEQ ID NO: 204 - protein, 1291 aa, Artificial Sequence
  Synthetic
MKRTADGSEFESPKKKRKVSEVEFSHEYWMRHALTLAKRARDEREVPVGAVLVLNNRVIGEGWNRAIGLHDPTAHAEIMALRQGGLVMQNYRLIDATLYVTFEPCVMCAGAMIHSRIGRVVFGVRNSKRGAAGSLMNVLNYPGMNHRVEITEGILADECAALLCDFYRMPRQVFNAQKKAQSSINSGGSSGGSSGSETPGTSESATPESSGGSSGGSGKRNYILGLAIGITSVGYGIIDYETRDVIDAGVRLFKEANVENNEGRRSKRGARRLKRRRRHRIQRVKKLLFDYNLLTDHSELSGINPYEARVKGLSQKLSEEEFSAALLHLAKRRGVHNVNEVEEDTGNELSTKEQISRNSKALEEKYVAELQLERLKKDGEVRGSINRFKTSDYVKEAKQLLKVQKAYHQLDQSFIDTYIDLLETRRTYYEGPGEGSPFGWKDIKEWYEMLMGHCTYFPEELRSVKYAYNADLYNALNDLNNLVITRDENEKLEYYEKFQIIENVFKQKKKPTLKQIAKEILVNEEDIKGYRVTSTGKPEFTNLKVYHDIKDITARKEIIENAELLDQIAKILTIYQSSEDIQEELTNLNSELTQEEIEQISNLKGYTGTHNLSLKAINLILDELWHTNDNQIAIFNRLKLVPKKVDLSQQKEIPTTLVDDFILSPVVKRSFIQSIKVINAIIKKYGLPNDIIIELAREKNSKDAQKMINEMQKRNRQTNERIEEIIRTTGKENAKYLIEKIKLHDMQEGKCLYSLEAIPLEDLLNNPFNYEVDHIIPRSVSFDNSFNNKVLVKQEENSKKGNRTPFQYLSSSDSKISYETFKKHILNLAKGKGRISKTKKEYLLEERDINRFSVQKDFINRNLVDTRYATRGLMNLLRSYFRVNNLDVKVKSINGGFTSFLRRKWKFKKERNKGYKHHAEDALIIANADFIFKEWKKLDKAKKVMENQMFEEKQAESMPEIETEQEYKEIFITPHQIKHIKDFKDYKYSHRVDKKPNRELINDTLYSTRKDDKGNTLIVNNLNGLYDKDNDKLKKLINKSPEKLLMYHHDPQTYQKLKLIMEQYGDEKNPLYKYYEETGNYLTKYSKKDNGPVIKKIKYYGNKLNAHLDITDDYPNSRNKVVKLSLKPYRFDVYLDNGVYKFVTVKNLDVIKKENYYEVNSKCYEEAKKLKKISNQAEFIASFYNNDLIKINGELYRVIGVNNDLLNRIEVNMIDITYREYLENMNDKRPPRIIKTIASKTQSIKKYSTDILGNLYEVKSKKHPQIIKKGSGGSKRTADGSEFEPKKKRKV

SEQ ID NO: 205 - protein, 1489 aa, Artificial Sequence
  Synthetic
MKRTADGSEFESPKKKRKVSEVEFSHEYWMRHALTLAKRAWDEREVPVGAVLVHNNRVIGEGWNRPIGRHDPTAHAEIMALRQGGLVMQNYRLIDATLYVTLEPCVMCAGAMIHSRIGRVVFGARDAKTGAAGSLMDVLHHPGMNHRVEITEGILADECAALLSDFFRMRRQEIKAQKKAQSSTDSGGSSGGSSGSETPGTSESATPESSGGSSGGSSEVEFSHEYWMRHALTLAKRARDEREVPVGAVLVLNNRVIGEGWNRAIGLHDPTAHAEIMALRQGGLVMQNYRLIDATLYVTFEPCVMCAGAMIHSRIGRVVFGVRNSKRGAAGSLMNVLNYPGMNHRVEITEGILADECAALLCDFYRMPRQVFNAQKKAQSSINSGGSSGGSSGSETPGTSESATPESSGGSSGGSGKRNYILGLAIGITSVGYGIIDYETRDVIDAGVRLFKEANVENNEGRRSKRGARRLKRRRRHRIQRVKKLLFDYNLLTDHSELSGINPYEARVKGLSQKLSEEEFSAALLHLAKRRGVHNVNEVEEDTGNELSTKEQISRNSKALEEKYVAELQLERLKKDGEVRGSINRFKTSDYVKEAKQLLKVQKAYHQLDQSFIDTYIDLLETRRTYYEGPGEGSPFGWKDIKEWYEMLMGHCTYFPEELRSVKYAYNADLYNALNDLNNLVITRDENEKLEYYEKFQIIENVFKQKKKPTLKQIAKEILVNEEDIKGYRVTSTGKPEFTNLKVYHDIKDITARKEIIENAELLDQIAKILTIYQSSEDIQEELTNLNSELTQEEIEQISNLKGYTGTHNLSLKAINLILDELWHTNDNQIAIFNRLKLVPKKVDLSQQKEIPTTLVDDFILSPVVKRSFIQSIKVINAIIKKYGLPNDIIIELAREKNSKDAQKMINEMQKRNRQTNERIEEIIRTTGKENAKYLIEKIKLHDMQEGKCLYSLEAIPLEDLLNNPFNYEVDHIIPRSVSFDNSFNNKVLVKQEENSKKGNRTPFQYLSSSDSKISYETFKKHILNLAKGKGRISKTKKEYLLEERDINRFSVQKDFINRNLVDTRYATRGLMNLLRSYFRVNNLDVKVKSINGGFTSFLRRKWKFKKERNKGYKHHAEDALIIANADFIFKEWKKLDKAKKVMENQMFEEKQAESMPEIETEQEYKEIFITPHQIKHIKDFKDYKYSHRVDKKPNRELINDTLYSTRKDDKGNTLIVNNLNGLYDKDNDKLKKLINKSPEKLLMYHHDPQTYQKLKLIMEQYGDEKNPLYKYYEETGNYLTKYSKKDNGPVIKKIKYYGNKLNAHLDITDDYPNSRNKVVKLSLKPYRFDVYLDNGVYKFVTVKNLDVIKKENYYEVNSKCYEEAKKLKKISNQAEFIASFYNNDLIKINGELYRVIGVNNDLLNRIEVNMIDITYREYLENMNDKRPPRIIKTIASKTQSIKKYSTDILGNLYEVKSKKHPQIIKKGSGGSKRTADGSEFEPKKKRKV

SEQ ID NO: 206 - protein, 1464 aa, Artificial Sequence
  Synthetic
MKRTADGSEFESPKKKRKVSEVEFSHEYWMRHALTLAKRARDEREVPVGAVLVLNNRVIGEGWNRAIGLHDPTAHAEIMALRQGGLVMQNYRLIDATLYVTFEPCVMCAGAMIHSRIGRVVFGVRNSKRGAAGSLMNVLNYPGMNHRVEITEGILADECAALLCDFYRMPRQVFNAQKKAQSSINSGGSSGGSSGSETPGTSESATPESSGGSSGGSSKLEKFTNCYSLSKTLRFKAIPVGKTQENIDNKRLLVEDEKRAEDYKGVKKLLDRYYLSFINDVLHSIKLKNLNNYISLFRKKTRTEKENKELENLEINLRKEIAKAFKGNEGYKSLFKKDIIETILPEFLDDKDEIALVNSFNGFTTAFTGFFDNRENMFSEEAKSTSIAFRCINENLTRYISNMDIFEKVDAIFDKHEVQEIKEKILNSDYDVEDFFEGEFFNFVLTQEGIDVYNAIIGGFVTESGEKIKGLNEYINLYNQKTKQKLPKFKPLYKQVLSDRESLSFYGEGYTSDEEVLEVFRNTLNKNSEIFSSIKKLEKLFKNFDEYSSAGIFVKNGPAISTISKDIFGEWNVIRDKWNAEYDDIHLKKKAVVTEKYEDDRRKSFKKIGSFSLEQLQEYADADLSVVEKLKEIIIQKVDEIYKVYGSSEKLFDADFVLEKSLKKNDAVVAIMKDLLDSVKSFENYIKAFFGEGKETNRDESFYGDFVLAYDILLKVDHIYDAIRNYVTQKPYSKDKFKLYFQNPQFMGGWDKDKETDYRATILRYGSKYYLAIMDKKYAKCLQKIDKDDVNGNYEKINYKLLPGPNKMLPKVFFSKKWMAYYNPSEDIQKIYKNGTFKKGDMFNLNDCHKLIDFFKDSISRYPKWSNAYDFNFSETEKYKDIAGFYREVEEQGYKVSFESASKKEVDKLVEEGKLYMFQIYNKDFSDKSHGTPNLHTMYFKLLFDENNHGQIRLSGGAELFMRRASLKKEELVVHPANSPIANKNPDNPKKTTTLSYDVYKDKRFSEDQYELHIPIAINKCPKNIFKINTEVRVLLKHDDNPYVIGIARGERNLLYIVVVDGKGNIVEQYSLNEIINNFNGIRIKTDYHSLLDKKEKERFEARQNWTSIENIKELKAGYISQVVHKICELVEKYDAVIALEDLNSGFKNSRVKVEKQVYQKFEKMLIDKLNYMVDKKSNPCATGGALKGYQITNKFESFKSMSTQNGFIFYIPAWLTSKIDPSTGFVNLLKTKYTSIADSKKFISSFDRIMYVPEEDLFEFALDYKNFSRTDADYIKKWKLYSYGNRIRIFRNPKKNNVFDWEEVCLTSAYKELFNKYGINYQQGDIRALLCEQSDKAFYSSFMALMSLMLQMRNSITGRTDVDFLISPVKNSDGIFYDSRNYEAQENAILPKNADANGAYNIARKVLWAIGQFKKAEDEKLDKVKIAISNKEWLEYAQTSVKSGGSKRTADGSEFEPKKKRKV

SEQ ID NO: 207 - protein, 1662 aa, Artificial Sequence
  Synthetic
MKRTADGSEFESPKKKRKVSEVEFSHEYWMRHALTLAKRAWDEREVPVGAVLVHNNRVIGEGWNRPIGRHDPTAHAEIMALRQGGLVMQNYRLIDATLYVTLEPCVMCAGAMIHSRIGRVVFGARDAKTGAAGSLMDVLHHPGMNHRVEITEGILADECAALLSDFFRMRRQEIKAQKKAQSSTDSGGSSGGSSGSETPGTSESATPESSGGSSGGSSEVEFSHEYWMRHALTLAKRARDEREVPVGAVLVLNNRVIGEGWNRAIGLHDPTAHAEIMALRQGGLVMQNYRLIDATLYVTFEPCVMCAGAMIHSRIGRVVFGVRNSKRGAAGSLMNVLNYPGMNHRVEITEGILADECAALLCDFYRMPRQVFNAQKKAQSSINSGGSSGGSSGSETPGTSESATPESSGGSSGGSSKLEKFTNCYSLSKTLRFKAIPVGKTQENIDNKRLLVEDEKRAEDYKGVKKLLDRYYLSFINDVLHSIKLKNLNNYISLFRKKTRTEKENKELENLEINLRKEIAKAFKGNEGYKSLFKKDIIETILPEFLDDKDEIALVNSFNGFTTAFTGFFDNRENMFSEEAKSTSIAFRCINENLTRYISNMDIFEKVDAIFDKHEVQEIKEKILNSDYDVEDFFEGEFFNFVLTQEGIDVYNAIIGGFVTESGEKIKGLNEYINLYNQKTKQKLPKFKPLYKQVLSDRESLSFYGEGYTSDEEVLEVFRNTLNKNSEIFSSIKKLEKLFKNFDEYSSAGIFVKNGPAISTISKDIFGEWNVIRDKWNAEYDDIHLKKKAVVTEKYEDDRRKSFKKIGSFSLEQLQEYADADLSVVEKLKEIIIQKVDEIYKVYGSSEKLFDADFVLEKSLKKNDAVVAIMKDLLDSVKSFENYIKAFFGEGKETNRDESFYGDFVLAYDILLKVDHIYDAIRNYVTQKPYSKDKFKLYFQNPQFMGGWDKDKETDYRATILRYGSKYYLAIMDKKYAKCLQKIDKDDVNGNYEKINYKLLPGPNKMLPKVFFSKKWMAYYNPSEDIQKIYKNGTFKKGDMFNLNDCHKLIDFFKDSISRYPKWSNAYDFNFSETEKYKDIAGFYREVEEQGYKVSFESASKKEVDKLVEEGKLYMFQIYNKDFSDKSHGTPNLHTMYFKLLFDENNHGQIRLSGGAELFMRRASLKKEELVVHPANSPIANKNPDNPKKTTTLSYDVYKDKRFSEDQYELHIPIAINKCPKNIFKINTEVRVLLKHDDNPYVIGIARGERNLLYIVVVDGKGNIVEQYSLNEIINNFNGIRIKTDYHSLLDKKEKERFEARQNWTSIENIKELKAGYISQVVHKICELVEKYDAVIALEDLNSGFKNSRVKVEKQVYQKFEKMLIDKLNYMVDKKSNPCATGGALKGYQITNKFESFKSMSTQNGFIFYIPAWLTSKIDPSTGFVNLLKTKYTSIADSKKFISSFDRIMYVPEEDLFEFALDYKNFSRTDADYIKKWKLYSYGNRIRIFRNPKKNNVFDWEEVCLTSAYKELFNKYGINYQQGDIRALLCEQSDKAFYSSFMALMSLMLQMRNSITGRTDVDFLISPVKNSDGIFYDSRNYEAQENAILPKNADANGAYNIARKVLWAIGQFKKAEDEKLDKVKIAISNKEWLEYAQTSVKSGGSKRTADGSEFEPKKKRKV

SEQ ID NO: 208 - protein, 1662 aa, Artificial Sequence
  Synthetic
MKRTADGSEFESPKKKRKVSEVEFSHEYWMRHALTLAKRAWDEREVPVGAVLVHNNRVIGEGWNRPIGRHDPTAHAEIMALRQGGLVMQNYRLIDATLYVTLEPCVMCAGAMIHSRIGRVVFGARDAKTGAAGSLMDVLHHPGMNHRVEITEGILADECAALLSDFFRMRRQEIKAQKKAQSSTDSGGSSGGSSGSETPGTSESATPESSGGSSGGSSEVEFSHEYWMRHALTLAKRARDEREVPVGAVLVLNNRVIGEGWNRAIGLHDPTAHAEIMALRQGGLVMQNYRLIDATLYVTFEPCVMCAGAMIHSRIGRVVFGVRNAKTGAAGSLMDVLHYPGMNHRVEITEGILADECAALLCYFFRMPRQVFNAQKKAQSSTDSGGSSGGSSGSETPGTSESATPESSGGSSGGSSKLEKFTNCYSLSKTLRFKAIPVGKTQENIDNKRLLVEDEKRAEDYKGVKKLLDRYYLSFINDVLHSIKLKNLNNYISLFRKKTRTEKENKELENLEINLRKEIAKAFKGNEGYKSLFKKDIIETILPEFLDDKDEIALVNSFNGFTTAFTGFFDNRENMFSEEAKSTSIAFRCINENLTRYISNMDIFEKVDAIFDKHEVQEIKEKILNSDYDVEDFFEGEFFNFVLTQEGIDVYNAIIGGFVTESGEKIKGLNEYINLYNQKTKQKLPKFKPLYKQVLSDRESLSFYGEGYTSDEEVLEVFRNTLNKNSEIFSSIKKLEKLFKNFDEYSSAGIFVKNGPAISTISKDIFGEWNVIRDKWNAEYDDIHLKKKAVVTEKYEDDRRKSFKKIGSFSLEQLQEYADADLSVVEKLKEIIIQKVDEIYKVYGSSEKLFDADFVLEKSLKKNDAVVAIMKDLLDSVKSFENYIKAFFGEGKETNRDESFYGDFVLAYDILLKVDHIYDAIRNYVTQKPYSKDKFKLYFQNPQFMGGWDKDKETDYRATILRYGSKYYLAIMDKKYAKCLQKIDKDDVNGNYEKINYKLLPGPNKMLPKVFFSKKWMAYYNPSEDIQKIYKNGTFKKGDMFNLNDCHKLIDFFKDSISRYPKWSNAYDFNFSETEKYKDIAGFYREVEEQGYKVSFESASKKEVDKLVEEGKLYMFQIYNKDFSDKSHGTPNLHTMYFKLLFDENNHGQIRLSGGAELFMRRASLKKEELVVHPANSPIANKNPDNPKKTTTLSYDVYKDKRFSEDQYELHIPIAINKCPKNIFKINTEVRVLLKHDDNPYVIGIARGERNLLYIVVVDGKGNIVEQYSLNEIINNFNGIRIKTDYHSLLDKKEKERFEARQNWTSIENIKELKAGYISQVVHKICELVEKYDAVIALEDLNSGFKNSRVKVEKQVYQKFEKMLIDKLNYMVDKKSNPCATGGALKGYQITNKFESFKSMSTQNGFIFYIPAWLTSKIDPSTGFVNLLKTKYTSIADSKKFISSFDRIMYVPEEDLFEFALDYKNFSRTDADYIKKWKLYSYGNRIRIFRNPKKNNVFDWEEVCLTSAYKELFNKYGINYQQGDIRALLCEQSDKAFYSSFMALMSLMLQMRNSITGRTDVDFLISPVKNSDGIFYDSRNYEAQENAILPKNADANGAYNIARKVLWAIGQFKKAEDEKLDKVKIAISNKEWLEYAQTSVKSGGSKRTADGSEFEPKKKRKV

SEQ ID NO: 209 - protein, 1545 aa, Artificial Sequence
  Synthetic
MKRTADGSEFESPKKKRKVSEVEFSHEYWMRHALTLAKRARDEREVPVGAVLVLNNRVIGEGWNRAIGLHDPTAHAEIMALRQGGLVMQNYRLIDATLYVTFEPCVMCAGAMIHSRIGRVVFGVRNSKRGAAGSLMNVLNYPGMNHRVEITEGILADECAALLCDFYRMPRQVFNAQKKAQSSINSGGSSGGSSGSETPGTSESATPESSGGSSGGSMTQFEGFTNLYQVSKTLRFELIPQGKTLKHIQEQGFIEEDKARNDHYKELKPIIDRIYKTYADQCLQLVQLDWENLSAAIDSYRKEKTEETRNALIEEQATYRNAIHDYFIGRTDNLTDAINKRHAEIYKGLFKAELFNGKVLKQLGTVTTTEHENALLRSFDKFTTYFSGFYRNRKNVFSAEDISTAIPHRIVQDNFPKFKENCHIFTRLITAVPSLREHFENVKKAIGIFVSTSIEEVFSFPFYNQLLTQTQIDLYNQLLGGISREAGTEKIKGLNEVLNLAIQKNDETAHIIASLPHRFIPLFKQILSDRNTLSFILEEFKSDEEVIQSFCKYKTLLRNENVLETAEALFNELNSIDLTHIFISHKKLETISSALCDHWDTLRNALYERRISELTGKITKSAKEKVQRSLKHEDINLQEIISAAGKELSEAFKQKTSEILSHAHAALDQPLPTTLKKQEEKEILKSQLDSLLGLYHLLDWFAVDESNEVDPEFSARLTGIKLEMEPSLSFYNKARNYATKKPYSVEKFKLNFQMPTLARGWDVNREKNNGAILFVKNGLYYLGIMPKQKGRYKALSFEPTEKTSEGFDKMYYDYFPDAAKMIPKCSTQLKAVTAHFQTHTTPILLSNNFIEPLEITKEIYDLNNPEKEPKKFQTAYAKKTGDQKGYREALCKWIDFTRDFLSKYTKTTSIDLSSLRPSSQYKDLGEYYAELNPLLYHISFQRIAEKEIMDAVETGKLYLFQIYNKDFAKGHHGKPNLHTLYWTGLFSPENLAKTSIKLNGQAELFYRPKSRMKRMAHRLGEKMLNKKLKDQKTPIPDTLYQELYDYVNHRLSHDLSDEARALLPNVITKEVSHEIIKDRRFTSDKFFFHVPITLNYQAANSPSKFNQRVNAYLKEHPETPIIGIARGERNLIYITVIDSTGKILEQRSLNTIQQFDYQKKLDNREKERVAARQAWSVVGTIKDLKQGYLSQVIHEIVDLMIHYQAVVVLENLNFGFKSKRTGIAEKAVYQQFEKMLIDKLNCLVLKDYPAEKVGGVLNPYQLTDQFTSFAKMGTQSGFLFYVPAPYTSKIDPLTGFVDPFVWKTIKNHESRKHFLEGFDFLHYDVKTGDFILHFKMNRNLSFQRGLPGFMPAWDIVFEKNETQFDAKGTPFIAGKRIVPVIENHRFTGRYRDLYPANELIALLEEKGIVFRDGSNILPKLLENDDSHAIDTMVALIRSVLQMRNSNAATGEDYINSPVRDLNGVCFDSRFQNPEWPMDADANGAYHIALKGQLLLNHLKESKDLKLQNGISNQDWLAYIQELRNSGGSKRTADGSEFEPKKKRKV

SEQ ID NO: 210 - protein, 1743 aa, Artificial Sequence
  Synthetic
MKRTADGSEFESPKKKRKVSEVEFSHEYWMRHALTLAKRAWDEREVPVGAVLVHNNRVIGEGWNRPIGRHDPTAHAEIMALRQGGLVMQNYRLIDATLYVTLEPCVMCAGAMIHSRIGRVVFGARDAKTGAAGSLMDVLHHPGMNHRVEITEGILADECAALLSDFFRMRRQEIKAQKKAQSSTDSGGSSGGSSGSETPGTSESATPESSGGSSGGSSEVEFSHEYWMRHALTLAKRARDEREVPVGAVLVLNNRVIGEGWNRAIGLHDPTAHAEIMALRQGGLVMQNYRLIDATLYVTFEPCVMCAGAMIHSRIGRVVFGVRNSKRGAAGSLMNVLNYPGMNHRVEITEGILADECAALLCDFYRMPRQVFNAQKKAQSSINSGGSSGGSSGSETPGTSESATPESSGGSSGGSMTQFEGFTNLYQVSKTLRFELIPQGKTLKHIQEQGFIEEDKARNDHYKELKPIIDRIYKTYADQCLQLVQLDWENLSAAIDSYRKEKTEETRNALIEEQATYRNAIHDYFIGRTDNLTDAINKRHAEIYKGLFKAELFNGKVLKQLGTVTTTEHENALLRSFDKFTTYFSGFYRNRKNVFSAEDISTAIPHRIVQDNFPKFKENCHIFTRLITAVPSLREHFENVKKAIGIFVSTSIEEVFSFPFYNQLLTQTQIDLYNQLLGGISREAGTEKIKGLNEVLNLAIQKNDETAHIIASLPHRFIPLFKQILSDRNTLSFILEEFKSDEEVIQSFCKYKTLLRNENVLETAEALFNELNSIDLTHIFISHKKLETISSALCDHWDTLRNALYERRISELTGKITKSAKEKVQRSLKHEDINLQEIISAAGKELSEAFKQKTSEILSHAHAALDQPLPTTLKKQEEKEILKSQLDSLLGLYHLLDWFAVDESNEVDPEFSARLTGIKLEMEPSLSFYNKARNYATKKPYSVEKFKLNFQMPTLARGWDVNREKNNGAILFVKNGLYYLGIMPKQKGRYKALSFEPTEKTSEGFDKMYYDYFPDAAKMIPKCSTQLKAVTAHFQTHTTPILLSNNFIEPLEITKEIYDLNNPEKEPKKFQTAYAKKTGDQKGYREALCKWIDFTRDFLSKYTKTTSIDLSSLRPSSQYKDLGEYYAELNPLLYHISFQRIAEKEIMDAVETGKLYLFQIYNKDFAKGHHGKPNLHTLYWTGLFSPENLAKTSIKLNGQAELFYRPKSRMKRMAHRLGEKMLNKKLKDQKTPIPDTLYQELYDYVNHRLSHDLSDEARALLPNVITKEVSHEIIKDRRFTSDKFFFHVPITLNYQAANSPSKFNQRVNAYLKEHPETPIIGIARGERNLIYITVIDSTGKILEQRSLNTIQQFDYQKKLDNREKERVAARQAWSVVGTIKDLKQGYLSQVIHEIVDLMIHYQAVVVLENLNFGFKSKRTGIAEKAVYQQFEKMLIDKLNCLVLKDYPAEKVGGVLNPYQLTDQFTSFAKMGTQSGFLFYVPAPYTSKIDPLTGFVDPFVWKTIKNHESRKHFLEGFDFLHYDVKTGDFILHFKMNRNLSFQRGLPGFMPAWDIVFEKNETQFDAKGTPFIAGKRIVPVIENHRFTGRYRDLYPANELIALLEEKGIVFRDGSNILPKLLENDDSHAIDTMVALIRSVLQMRNSNAATGEDYINSPVRDLNGVCFDSRFQNPEWPMDADANGAYHIALKGQLLLNHLKESKDLKLQNGISNQDWLAYIQELRNSGGSKRTADGSEFEPKKKRKV

SEQ ID NO: 211 - protein, 1743 aa, Artificial Sequence
  Synthetic
MKRTADGSEFESPKKKRKVSEVEFSHEYWMRHALTLAKRAWDEREVPVGAVLVHNNRVIGEGWNRPIGRHDPTAHAEIMALRQGGLVMQNYRLIDATLYVTLEPCVMCAGAMIHSRIGRVVFGARDAKTGAAGSLMDVLHHPGMNHRVEITEGILADECAALLSDFFRMRRQEIKAQKKAQSSTDSGGSSGGSSGSETPGTSESATPESSGGSSGGSSEVEFSHEYWMRHALTLAKRARDEREVPVGAVLVLNNRVIGEGWNRAIGLHDPTAHAEIMALRQGGLVMQNYRLIDATLYVTFEPCVMCAGAMIHSRIGRVVFGVRNAKTGAAGSLMDVLHYPGMNHRVEITEGILADECAALLCYFFRMPRQVFNAQKKAQSSTDSGGSSGGSSGSETPGTSESATPESSGGSSGGSMTQFEGFTNLYQVSKTLRFELIPQGKTLKHIQEQGFIEEDKARNDHYKELKPIIDRIYKTYADQCLQLVQLDWENLSAAIDSYRKEKTEETRNALIEEQATYRNAIHDYFIGRTDNLTDAINKRHAEIYKGLFKAELFNGKVLKQLGTVTTTEHENALLRSFDKFTTYFSGFYRNRKNVFSAEDISTAIPHRIVQDNFPKFKENCHIFTRLITAVPSLREHFENVKKAIGIFVSTSIEEVFSFPFYNQLLTQTQIDLYNQLLGGISREAGTEKIKGLNEVLNLAIQKNDETAHIIASLPHRFIPLFKQILSDRNTLSFILEEFKSDEEVIQSFCKYKTLLRNENVLETAEALFNELNSIDLTHIFISHKKLETISSALCDHWDTLRNALYERRISELTGKITKSAKEKVQRSLKHEDINLQEIISAAGKELSEAFKQKTSEILSHAHAALDQPLPTTLKKQEEKEILKSQLDSLLGLYHLLDWFAVDESNEVDPEFSARLTGIKLEMEPSLSFYNKARNYATKKPYSVEKFKLNFQMPTLARGWDVNREKNNGAILFVKNGLYYLGIMPKQKGRYKALSFEPTEKTSEGFDKMYYDYFPDAAKMIPKCSTQLKAVTAHFQTHTTPILLSNNFIEPLEITKEIYDLNNPEKEPKKFQTAYAKKTGDQKGYREALCKWIDFTRDFLSKYTKTTSIDLSSLRPSSQYKDLGEYYAELNPLLYHISFQRIAEKEIMDAVETGKLYLFQIYNKDFAKGHHGKPNLHTLYWTGLFSPENLAKTSIKLNGQAELFYRPKSRMKRMAHRLGEKMLNKKLKDQKTPIPDTLYQELYDYVNHRLSHDLSDEARALLPNVITKEVSHEIIKDRRFTSDKFFFHVPITLNYQAANSPSKFNQRVNAYLKEHPETPIIGIARGERNLIYITVIDSTGKILEQRSLNTIQQFDYQKKLDNREKERVAARQAWSVVGTIKDLKQGYLSQVIHEIVDLMIHYQAVVVLENLNFGFKSKRTGIAEKAVYQQFEKMLIDKLNCLVLKDYPAEKVGGVLNPYQLTDQFTSFAKMGTQSGFLFYVPAPYTSKIDPLTGFVDPFVWKTIKNHESRKHFLEGFDFLHYDVKTGDFILHFKMNRNLSFQRGLPGFMPAWDIVFEKNETQFDAKGTPFIAGKRIVPVIENHRFTGRYRDLYPANELIALLEEKGIVFRDGSNILPKLLENDDSHAIDTMVALIRSVLQMRNSNAATGEDYINSPVRDLNGVCFDSRFQNPEWPMDADANGAYHIALKGQLLLNHLKESKDLKLQNGISNQDWLAYIQELRNSGGSKRTADGSEFEPKKKRKV

SEQ ID NO: 212 - protein, 1605 aa, Artificial Sequence
  Synthetic
MKRTADGSEFESPKKKRKVSEVEFSHEYWMRHALTLAKRARDEREVPVGAVLVLNNRVIGEGWNRAIGLHDPTAHAEIMALRQGGLVMQNYRLIDATLYVTFEPCVMCAGAMIHSRIGRVVFGVRNSKRGAAGSLMNVLNYPGMNHRVEITEGILADECAALLCDFYRMPRQVFNAQKKAQSSINSGGSSGGSSGSETPGTSESATPESSGGSSGGSDKKYSIGLAIGTNSVGWAVITDEYKVPSKKFKVLGNTDRHSIKKNLIGALLFDSGETAEATRLKRTARRRYTRRKNRICYLQEIFSNEMAKVDDSFFHRLEESFLVEEDKKHERHPIFGNIVDEVAYHEKYPTIYHLRKKLVDSTDKADLRLIYLALAHMIKFRGHFLIEGDLNPDNSDVDKLFIQLVQTYNQLFEENPINASGVDAKAILSARLSKSRRLENLIAQLPGEKKNGLFGNLIALSLGLTPNFKSNFDLAEDAKLQLSKDTYDDDLDNLLAQIGDQYADLFLAAKNLSDAILLSDILRVNTEITKAPLSASMIKRYDEHHQDLTLLKALVRQQLPEKYKEIFFDQSKNGYAGYIDGGASQEEFYKFIKPILEKMDGTEELLVKLNREDLLRKQRTFDNGSIPHQIHLGELHAILRRQEDFYPFLKDNREKIEKILTFRIPYYVGPLARGNSRFAWMTRKSEETITPWNFEEVVDKGASAQSFIERMTNFDKNLPNEKVLPKHSLLYEYFTVYNELTKVKYVTEGMRKPAFLSGEQKKAIVDLLFKTNRKVTVKQLKEDYFKKIECFDSVEISGVEDRFNASLGTYHDLLKIIKDKDFLDNEENEDILEDIVLTLTLFEDREMIEERLKTYAHLFDDKVMKQLKRRRYTGWGRLSRKLINGIRDKQSGKTILDFLKSDGFANRNFMQLIHDDSLTFKEDIQKAQVSGQGDSLHEHIANLAGSPAIKKGILQTVKVVDELVKVMGRHKPENIVIEMARENQTTQKGQKNSRERMKRIEEGIKELGSQILKEHPVENTQLQNEKLYLYYLQNGRDMYVDQELDINRLSDYDVDHIVPQSFLKDDSIDNKVLTRSDKNRGKSDNVPSEEVVKKMKNYWRQLLNAKLITQRKFDNLTKAERGGLSELDKAGFIKRQLVETRQITKHVAQILDSRMNTKYDENDKLIREVKVITLKSKLVSDFRKDFQFYKVREINNYHHAHDAYLNAVVGTALIKKYPKLESEFVYGDYKVYDVRKMIAKSEQEIGKATAKYFFYSNIMNFFKTEITLANGEIRKRPLIETNGETGEIVWDKGRDFATVRKVLSMPQVNIVKKTEVQTGGFSKESIRPKRNSDKLIARKKDWDPKKYGGFVSPTVAYSVLVVAKVEKGKSKKLKSVKELLGITIMERSSFEKNPIDFLEAKGYKEVKKDLIIKLPKYSLFELENGRKRMLASARFLQKGNELALPSKYVNFLYLASHYEKLKGSPEDNEQKQLFVEQHKHYLDEIIEQISEFSKRVILADANLDKVLSAYNKHRDKPIREQAENIIHLFTLTNLGAPRAFKYFDTTIDRKVYRSTKEVLDATLIHQSITGLYETRIDLSQLGGDSGGSKRTADGSEFEPKKKRKV

SEQ ID NO: 213 - protein, 1803 aa, Artificial Sequence
  Synthetic
MKRTADGSEFESPKKKRKVSEVEFSHEYWMRHALTLAKRAWDEREVPVGAVLVHNNRVIGEGWNRPIGRHDPTAHAEIMALRQGGLVMQNYRLIDATLYVTLEPCVMCAGAMIHSRIGRVVFGARDAKTGAAGSLMDVLHHPGMNHRVEITEGILADECAALLSDFFRMRRQEIKAQKKAQSSTDSGGSSGGSSGSETPGTSESATPESSGGSSGGSSEVEFSHEYWMRHALTLAKRARDEREVPVGAVLVLNNRVIGEGWNRAIGLHDPTAHAEIMALRQGGLVMQNYRLIDATLYVTFEPCVMCAGAMIHSRIGRVVFGVRNSKRGAAGSLMNVLNYPGMNHRVEITEGILADECAALLCDFYRMPRQVFNAQKKAQSSINSGGSSGGSSGSETPGTSESATPESSGGSSGGSDKKYSIGLAIGTNSVGWAVITDEYKVPSKKFKVLGNTDRHSIKKNLIGALLFDSGETAEATRLKRTARRRYTRRKNRICYLQEIFSNEMAKVDDSFFHRLEESFLVEEDKKHERHPIFGNIVDEVAYHEKYPTIYHLRKKLVDSTDKADLRLIYLALAHMIKFRGHFLIEGDLNPDNSDVDKLFIQLVQTYNQLFEENPINASGVDAKAILSARLSKSRRLENLIAQLPGEKKNGLFGNLIALSLGLTPNFKSNFDLAEDAKLQLSKDTYDDDLDNLLAQIGDQYADLFLAAKNLSDAILLSDILRVNTEITKAPLSASMIKRYDEHHQDLTLLKALVRQQLPEKYKEIFFDQSKNGYAGYIDGGASQEEFYKFIKPILEKMDGTEELLVKLNREDLLRKQRTFDNGSIPHQIHLGELHAILRRQEDFYPFLKDNREKIEKILTFRIPYYVGPLARGNSRFAWMTRKSEETITPWNFEEVVDKGASAQSFIERMTNFDKNLPNEKVLPKHSLLYEYFTVYNELTKVKYVTEGMRKPAFLSGEQKKAIVDLLFKTNRKVTVKQLKEDYFKKIECFDSVEISGVEDRFNASLGTYHDLLKIIKDKDFLDNEENEDILEDIVLTLTLFEDREMIEERLKTYAHLFDDKVMKQLKRRRYTGWGRLSRKLINGIRDKQSGKTILDFLKSDGFANRNFMQLIHDDSLTFKEDIQKAQVSGQGDSLHEHIANLAGSPAIKKGILQTVKVVDELVKVMGRHKPENIVIEMARENQTTQKGQKNSRERMKRIEEGIKELGSQILKEHPVENTQLQNEKLYLYYLQNGRDMYVDQELDINRLSDYDVDHIVPQSFLKDDSIDNKVLTRSDKNRGKSDNVPSEEVVKKMKNYWRQLLNAKLITQRKFDNLTKAERGGLSELDKAGFIKRQLVETRQITKHVAQILDSRMNTKYDENDKLIREVKVITLKSKLVSDFRKDFQFYKVREINNYHHAHDAYLNAVVGTALIKKYPKLESEFVYGDYKVYDVRKMIAKSEQEIGKATAKYFFYSNIMNFFKTEITLANGEIRKRPLIETNGETGEIVWDKGRDFATVRKVLSMPQVNIVKKTEVQTGGFSKESIRPKRNSDKLIARKKDWDPKKYGGFVSPTVAYSVLVVAKVEKGKSKKLKSVKELLGITIMERSSFEKNPIDFLEAKGYKEVKKDLIIKLPKYSLFELENGRKRMLASARFLQKGNELALPSKYVNFLYLASHYEKLKGSPEDNEQKQLFVEQHKHYLDEIIEQISEFSKRVILADANLDKVLSAYNKHRDKPIREQAENIIHLFTLTNLGAPRAFKYFDTTIDRKVYRSTKEVLDATLIHQSITGLYETRIDLSQLGGDSGGSKRTADGSEFEPKKKRKV

SEQ ID NO: 214 - protein, 1291 aa, Artificial Sequence; identical to SEQ ID NO: 204
  Synthetic

SEQ ID NO: 215 - protein, 1489 aa, Artificial Sequence; identical to SEQ ID NO: 205
  Synthetic

SEQ ID NO: 216 - protein, 1626 aa, Artificial Sequence
  Synthetic
MKRTADGSEFESPKKKRKVSEVEFSHEYWMRHALTLAKRARDEREVPVGAVLVLNNRVIGEGWNRAIGLHDPTAHAEIMALRQGGLVMQNYRLIDATLYVTFEPCVMCAGAMIHSRIGRVVFGVRNSKRGAAGSLMNVLNYPGMNHRVEITEGILADECAALLCDFYRMPRQVFNAQKKAQSSINSGGSSGGSSGSETPGTSESATPESSGGSSGGSEIGKATAKYFFYSNIMNFFKTEITLANGEIRKRPLIETNGETGEIVWDKGRDFATVRKVLSMPQVNIVKKTEVQTGGFSKESILPKRNSDKLIARKKDWDPKKYGGFDSPTVAYSVLVVAKVEKGKSKKLKSVKELLGITIMERSSFEKNPIDFLEAKGYKEVKKDLIIKLPKYSLFELENGRKRMLASAGELQKGNELALPSKYVNFLYLASHYEKLKGSPEDNEQKQLFVEQHKHYLDEIIEQISEFSKRVILADANLDKVLSAYNKHRDKPIREQAENIIHLFTLTNLGAPAAFKYFDTTIDRKRYTSTKEVLDATLIHQSITGLYETRIDLSQLGGDGGSGGSGGSGGSGGSGGSGGMDKKYSIGLAIGTNSVGWAVITDEYKVPSKKFKVLGNTDRHSIKKNLIGALLFDSGETAEATRLKRTARRRYTRRKNRICYLQEIFSNEMAKVDDSFFHRLEESFLVEEDKKHERHPIFGNIVDEVAYHEKYPTIYHLRKKLVDSTDKADLRLIYLALAHMIKFRGHFLIEGDLNPDNSDVDKLFIQLVQTYNQLFEENPINASGVDAKAILSARLSKSRRLENLIAQLPGEKKNGLFGNLIALSLGLTPNFKSNFDLAEDAKLQLSKDTYDDDLDNLLAQIGDQYADLFLAAKNLSDAILLSDILRVNTEITKAPLSASMIKRYDEHHQDLTLLKALVRQQLPEKYKEIFFDQSKNGYAGYIDGGASQEEFYKFIKPILEKMDGTEELLVKLNREDLLRKQRTFDNGSIPHQIHLGELHAILRRQEDFYPFLKDNREKIEKILTFRIPYYVGPLARGNSRFAWMTRKSEETITPWNFEEVVDKGASAQSFIERMTNFDKNLPNEKVLPKHSLLYEYFTVYNELTKVKYVTEGMRKPAFLSGEQKKAIVDLLFKTNRKVTVKQLKEDYFKKIECFDSVEISGVEDRFNASLGTYHDLLKIIKDKDFLDNEENEDILEDIVLTLTLFEDREMIEERLKTYAHLFDDKVMKQLKRRRYTGWGRLSRKLINGIRDKQSGKTILDFLKSDGFANRNFMQLIHDDSLTFKEDIQKAQVSGQGDSLHEHIANLAGSPAIKKGILQTVKVVDELVKVMGRHKPENIVIEMARENQTTQKGQKNSRERMKRIEEGIKELGSQILKEHPVENTQLQNEKLYLYYLQNGRDMYVDQELDINRLSDYDVDHIVPQSFLKDDSIDNKVLTRSDKNRGKSDNVPSEEVVKKMKNYWRQLLNAKLITQRKFDNLTKAERGGLSELDKAGFIKRQLVETRQITKHVAQILDSRMNTKYDENDKLIREVKVITLKSKLVSDFRKDFQFYKVREINNYHHAHDAYLNAVVGTALIKKYPKLESEFVYGDYKVYDVRKMIAKSEQSGGSKRTADGSEFEPKKKRKV

SEQ ID NO: 217 - protein, 1824 aa, Artificial Sequence
  Synthetic
MKRTADGSEFESPKKKRKVSEVEFSHEYWMRHALTLAKRAWDEREVPVGAVLVHNNRVIGEGWNRPIGRHDPTAHAEIMALRQGGLVMQNYRLIDATLYVTLEPCVMCAGAMIHSRIGRVVFGARDAKTGAAGSLMDVLHHPGMNHRVEITEGILADECAALLSDFFRMRRQEIKAQKKAQSSTDSGGSSGGSSGSETPGTSESATPESSGGSSGGSSEVEFSHEYWMRHALTLAKRARDEREVPVGAVLVLNNRVIGEGWNRAIGLHDPTAHAEIMALRQGGLVMQNYRLIDATLYVTFEPCVMCAGAMIHSRIGRVVFGVRNSKRGAAGSLMNVLNYPGMNHRVEITEGILADECAALLCDFYRMPRQVFNAQKKAQSSINSGGSSGGSSGSETPGTSESATPESSGGSSGGSEIGKATAKYFFYSNIMNFFKTEITLANGEIRKRPLIETNGETGEIVWDKGRDFATVRKVLSMPQVNIVKKTEVQTGGFSKESILPKRNSDKLIARKKDWDPKKYGGFDSPTVAYSVLVVAKVEKGKSKKLKSVKELLGITIMERSSFEKNPIDFLEAKGYKEVKKDLIIKLPKYSLFELENGRKRMLASAGELQKGNELALPSKYVNFLYLASHYEKLKGSPEDNEQKQLFVEQHKHYLDEIIEQISEFSKRVILADANLDKVLSAYNKHRDKPIREQAENIIHLFTLTNLGAPAAFKYFDTTIDRKRYTSTKEVLDATLIHQSITGLYETRIDLSQLGGDGGSGGSGGSGGSGGSGGSGGMDKKYSIGLAIGTNSVGWAVITDEYKVPSKKFKVLGNTDRHSIKKNLIGALLFDSGETAEATRLKRTARRRYTRRKNRICYLQEIFSNEMAKVDDSFFHRLEESFLVEEDKKHERHPIFGNIVDEVAYHEKYPTIYHLRKKLVDSTDKADLRLIYLALAHMIKFRGHFLIEGDLNPDNSDVDKLFIQLVQTYNQLFEENPINASGVDAKAILSARLSKSRRLENLIAQLPGEKKNGLFGNLIALSLGLTPNFKSNFDLAEDAKLQLSKDTYDDDLDNLLAQIGDQYADLFLAAKNLSDAILLSDILRVNTEITKAPLSASMIKRYDEHHQDLTLLKALVRQQLPEKYKEIFFDQSKNGYAGYIDGGASQEEFYKFIKPILEKMDGTEELLVKLNREDLLRKQRTFDNGSIPHQIHLGELHAILRRQEDFYPFLKDNREKIEKILTFRIPYYVGPLARGNSRFAWMTRKSEETITPWNFEEVVDKGASAQSFIERMTNFDKNLPNEKVLPKHSLLYEYFTVYNELTKVKYVTEGMRKPAFLSGEQKKAIVDLLFKTNRKVTVKQLKEDYFKKIECFDSVEISGVEDRFNASLGTYHDLLKIIKDKDFLDNEENEDILEDIVLTLTLFEDREMIEERLKTYAHLFDDKVMKQLKRRRYTGWGRLSRKLINGIRDKQSGKTILDFLKSDGFANRNFMQLIHDDSLTFKEDIQKAQVSGQGDSLHEHIANLAGSPAIKKGILQTVKVVDELVKVMGRHKPENIVIEMARENQTTQKGQKNSRERMKRIEEGIKELGSQILKEHPVENTQLQNEKLYLYYLQNGRDMYVDQELDINRLSDYDVDHIVPQSFLKDDSIDNKVLTRSDKNRGKSDNVPSEEVVKKMKNYWRQLLNAKLITQRKFDNLTKAERGGLSELDKAGFIKRQLVETRQITKHVAQILDSRMNTKYDENDKLIREVKVITLKSKLVSDFRKDFQFYKVREINNYHHAHDAYLNAVVGTALIKKYPKLESEFVYGDYKVYDVRKMIAKSEQSGGSKRTADGSEFEPKKKRKV

SEQ ID NO: 218 - protein, 1625 aa, Artificial Sequence
  Synthetic
MKRTADGSEFESPKKKRKVSEVEFSHEYWMRHALTLAKRARDEREVPVGAVLVLNNRVIGEGWNRAIGLHDPTAHAEIMALRQGGLVMQNYRLIDATLYVTFEPCVMCAGAMIHSRIGRVVFGVRNSKRGAAGSLMNVLNYPGMNHRVEITEGILADECAALLCDFYRMPRQVFNAQKKAQSSINSGGSSGGSSGSETPGTSESATPESSGGSSGGSNIMNFFKTEITLANGEIRKRPLIETNGETGEIVWDKGRDFATVRKVLSMPQVNIVKKTEVQTGGFSKESILPKRNSDKLIARKKDWDPKKYGGFDSPTVAYSVLVVAKVEKGKSKKLKSVKELLGITIMERSSFEKNPIDFLEAKGYKEVKKDLIIKLPKYSLFELENGRKRMLASAGELQKGNELALPSKYVNFLYLASHYEKLKGSPEDNEQKQLFVEQHKHYLDEIIEQISEFSKRVILADANLDKVLSAYNKHRDKPIREQAENIIHLFTLTNLGAPAAFKYFDTTIDRKRYTSTKEVLDATLIHQSITGLYETRIDLSQLGGDGGSGGSGGSGGSGGSGGSGGDKKYSIGLAIGTNSVGWAVITDEYKVPSKKFKVLGNTDRHSIKKNLIGALLFDSGETAEATRLKRTARRRYTRRKNRICYLQEIFSNEMAKVDDSFFHRLEESFLVEEDKKHERHPIFGNIVDEVAYHEKYPTIYHLRKKLVDSTDKADLRLIYLALAHMIKFRGHFLIEGDLNPDNSDVDKLFIQLVQTYNQLFEENPINASGVDAKAILSARLSKSRRLENLIAQLPGEKKNGLFGNLIALSLGLTPNFKSNFDLAEDAKLQLSKDTYDDDLDNLLAQIGDQYADLFLAAKNLSDAILLSDILRVNTEITKAPLSASMIKRYDEHHQDLTLLKALVRQQLPEKYKEIFFDQSKNGYAGYIDGGASQEEFYKFIKPILEKMDGTEELLVKLNREDLLRKQRTFDNGSIPHQIHLGELHAILRRQEDFYPFLKDNREKIEKILTFRIPYYVGPLARGNSRFAWMTRKSEETITPWNFEEVVDKGASAQSFIERMTNFDKNLPNEKVLPKHSLLYEYFTVYNELTKVKYVTEGMRKPAFLSGEQKKAIVDLLFKTNRKVTVKQLKEDYFKKIECFDSVEISGVEDRFNASLGTYHDLLKIIKDKDFLDNEENEDILEDIVLTLTLFEDREMIEERLKTYAHLFDDKVMKQLKRRRYTGWGRLSRKLINGIRDKQSGKTILDFLKSDGFANRNFMQLIHDDSLTFKEDIQKAQVSGQGDSLHEHIANLAGSPAIKKGILQTVKVVDELVKVMGRHKPENIVIEMARENQTTQKGQKNSRERMKRIEEGIKELGSQILKEHPVENTQLQNEKLYLYYLQNGRDMYVDQELDINRLSDYDVDHIVPQSFLKDDSIDNKVLTRSDKNRGKSDNVPSEEVVKKMKNYWRQLLNAKLITQRKFDNLTKAERGGLSELDKAGFIKRQLVETRQITKHVAQILDSRMNTKYDENDKLIREVKVITLKSKLVSDFRKDFQFYKVREINNYHHAHDAYLNAVVGTALIKKYPKLESEFVYGDYKVYDVRKMIAKSEQEIGKATAKYFFYSSGGSKRTADGSEFEPKKKRKV

SEQ ID NO: 219 - protein, 1605 aa, Artificial Sequence; identical to SEQ ID NO: 202
  Synthetic

SEQ ID NO: 220 - protein, 1605 aa, Artificial Sequence; identical to SEQ ID NO: 202
  Synthetic

SEQ ID NO: 221 - protein, 2135 aa, Artificial Sequence
  Synthetic
MKRTADGSEFESPKKKRKVSEVEFSHEYWMRHALTLAKRAWDEREVPVGAVLVHNNRVIGEGWNRPIGRHDPTAHAEIMALRQGGLVMQNYRLIDATLYVTLEPCVMCAGAMIHSRIGRVVFGARDAKTGAAGSLMDVLHHPGMNHRVEITEGILADECAALLSDFFRMRRQEIKAQKKAQSSTDSGGSSGGSSGSETPGTSESATPESSGGSSGGSGTTGATGGAGCTCTGGGCCTTCTTCTGAGCATTGAACACCTGTCTAGGCATCCGATAGAAATCGCACAGCAGGGCGGCACATTCATCTGCCAGGATTCCCTCGGTAATTTCGACGCGGTGATTCATGCCGGGGTAGTTCAGCACGTTCATCAGGGAGCCTGCGGCGCCTCTTTTTGAGTTCCTCACGCCAAACACCACGCGGCCGATCCTAGAGTGGATCATGGCGCCGGCGCACATCACGCAAGGCTCGAATGTCACGTACAGGGTGGCGTCAATCAGTCTGTAGTTCTGCATGACCAGGCCGCCCTGTCTCAGGGCCATAATTTCGGCATGGGCTGTTGGGTCGTGCAGGCCGATGGCTCTGTTCCAGCCCTCGCCGATCACTCTATTGTTCAGCACCAGCACGGCTCCCACAGGCACCTCCCTCTCATCCCGTGCCCTCTTGGCCAGGGTCAGGGCATGTCTCATCCAGTACTCGTGGGAAAACTCCACCTCAGASGGSSGGSSGSETPGTSESATPESSGGSSGGSDKKYSIGLAIGTNSVGWAVITDEYKVPSKKFKVLGNTDRHSIKKNLIGALLFDSGETAEATRLKRTARRRYTRRKNRICYLQEIFSNEMAKVDDSFFHRLEESFLVEEDKKHERHPIFGNIVDEVAYHEKYPTIYHLRKKLVDSTDKADLRLIYLALAHMIKFRGHFLIEGDLNPDNSDVDKLFIQLVQTYNQLFEENPINASGVDAKAILSARLSKSRRLENLIAQLPGEKKNGLFGNLIALSLGLTPNFKSNFDLAEDAKLQLSKDTYDDDLDNLLAQIGDQYADLFLAAKNLSDAILLSDILRVNTEITKAPLSASMIKRYDEHHQDLTLLKALVRQQLPEKYKEIFFDQSKNGYAGYIDGGASQEEFYKFIKPILEKMDGTEELLVKLNREDLLRKQRTFDNGSIPHQIHLGELHAILRRQEDFYPFLKDNREKIEKILTFRIPYYVGPLARGNSRFAWMTRKSEETITPWNFEEVVDKGASAQSFIERMTNFDKNLPNEKVLPKHSLLYEYFTVYNELTKVKYVTEGMRKPAFLSGEQKKAIVDLLFKTNRKVTVKQLKEDYFKKIECFDSVEISGVEDRFNASLGTYHDLLKIIKDKDFLDNEENEDILEDIVLTLTLFEDREMIEERLKTYAHLFDDKVMKQLKRRRYTGWGRLSRKLINGIRDKQSGKTILDFLKSDGFANRNFMQLIHDDSLTFKEDIQKAQVSGQGDSLHEHIANLAGSPAIKKGILQTVKVVDELVKVMGRHKPENIVIEMARENQTTQKGQKNSRERMKRIEEGIKELGSQILKEHPVENTQLQNEKLYLYYLQNGRDMYVDQELDINRLSDYDVDHIVPQSFLKDDSIDNKVLTRSDKNRGKSDNVPSEEVVKKMKNYWRQLLNAKLITQRKFDNLTKAERGGLSELDKAGFIKRQLVETRQITKHVAQILDSRMNTKYDENDKLIREVKVITLKSKLVSDFRKDFQFYKVREINNYHHAHDAYLNAVVGTALIKKYPKLESEFVYGDYKVYDVRKMIAKSEQEIGKATAKYFFYSNIMNFFKTEITLANGEIRKRPLIETNGETGEIVWDKGRDFATVRKVLSMPQVNIVKKTEVQTGGFSKESILPKRNSDKLIARKKDWDPKKYGGFDSPTVAYSVLVVAKVEKGKSKKLKSVKELLGITIMERSSFEKNPIDFLEAKGYKEVKKDLIIKLPKYSLFELENGRKRMLASAGELQKGNELALPSKYVNFLYLASHYEKLKGSPEDNEQKQLFVEQHKHYLDEIIEQISEFSKRVILADANLDKVLSAYNKHRDKPIREQAENIIHLFTLTNLGAPAAFKYFDTTIDRKRYTSTKEVLDATLIHQSITGLYETRIDLSQLGGDSGGSKRTADGSEFEPKKKRKV

SEQ ID NO: 222 - DNA, 4740 bp, Artificial Sequence
  Synthetic
atgaaacggacagccgacggaagcgagttcgagtcaccaaagaagaagcggaaagtctctgaagtcgagtttagccacgagtattggatgaggcacgcactgaccctggcaaagcgagcatgggatgaaagagaagtccccgtgggcgccgtgctggtgcacaacaatagagtgatcggagagggatggaacaggccaatcggccgccacgaccctaccgcacacgcagagatcatggcactgaggcagggaggcctggtcatgcagaattaccgcctgatcgatgccaccctgtatgtgacactggagccatgcgtgatgtgcgcaggagcaatgatccacagcaggatcggaagagtggtgttcggagcacgggacgccaagaccggcgcagcaggctccctgatggatgtgctgcaccaccccggcatgaaccaccgggtggagatcacagagggaatcctggcagacgagtgcgccgccctgctgagcgatttctttagaatgcggagacaggagatcaaggcccagaagaaggcacagagctccaccgactctggaggatctagcggaggatcctctggaagcgagacaccaggcacaagcgagtccgccacaccagagagctccggcggctcctccggaggatcctctgaggtggagttttcccacgagtactggatgagacatgccctgaccctggccaagagggcacgggatgagagggaggtgcctgtgggagccgtgctggtgctgaacaatagagtgatcggcgagggctggaacagagccatcggcctgcacgacccaacagcccatgccgaaattatggccctgagacagggcggcctggtcatgcagaactacagactgattgacgccaccctgtacgtgacattcgagccttgcgtgatgtgcgccggcgccatgatccactctaggatcggccgcgtggtgtttggcgtgaggaactcaaaaagaggcgccgcaggctccctgatgaacgtgctgaactaccccggcatgaatcaccgcgtcgaaattaccgagggaatcctggcagatgaatgtgccgccctgctgtgcgatttctatcggatgcctagacaggtgttcaatgctcagaagaaggcccagagctccatcaacagtggtggaagtagcggaggctcctctggctctgagacacctggcacaagcgagagcgcaacacctgaaagcagcgggggcagcagcggggggtcagacaagaagtacagcatcggcctggccatcggcaccaactctgtgggctgggccgtgatcaccgacgagtacaaggtgcccagcaagaaattcaaggtgctgggcaacaccgaccggcacagcatcaagaagaacctgatcggagccctgctgttcgacagcggcgaaacagccgaggccacccggctgaagagaaccgccagaagaagatacaccagacggaagaaccggatctgctatctgcaagagatcttcagcaacgagatggccaaggtggacgacagcttcttccacagactggaagagtccttcctggtggaagaggataagaagcacgagcggcaccccatcttcggcaacatcgtggacgaggtggcctaccacgagaagtaccccaccatctaccacctgagaaagaaactggtggacagcaccgacaaggccgacctgcggctgatctatctggccctggcccacatgatcaagttccggggccacttcctgatcgagggcgacctgaaccccgacaacagcgacgtggacaagctgttcatccagctggtgcagacctacaaccagctgttcgaggaaaaccccatcaacgccagcggcgtggacgccaaggccatcctgtctgccagactgagcaagagcagacggctggaaaatctgatcgcccagctgcccggcgagaagaagaatggcctgttcggaaacctgattgccctgagcctgggcctgacccccaacttcaagagcaacttcgacctggccgaggatgccaaactgcagctgagcaaggacacctacgacgacgacctggacaacctgctggcccagatcggcgaccagtacgccgacctgtttctggccgccaagaacctgtccgacgccatcctgctgagcgacatcctgagagtgaacaccgagatcaccaaggcccccctgagcgcctctatgatcaagagatacgacgagcaccaccaggacctgaccctgctgaaagctctcgtgcggcagcagctgcctgagaagtacaaagagattttcttcgaccagagcaagaacggctacgccggctacattgacggcggagccagccaggaagagttctacaagttcatcaagcccatcctggaaaagatggacggcaccgaggaactgctcgtgaagctgaacagagaggacctgctgcggaagcagcggaccttcgacaacggcagcatcccccaccagatccacctgggagagctgcacgccattctgcggcggcaggaagatttttacccattcctgaaggacaaccgggaaaagatcgagaagatcctgaccttccgcatcccctactacgtgggccctctggccaggggaaacagcagattcgcctggatgaccagaaagagcgaggaaaccatcaccccctggaacttcgaggaagtggtggacaagggcgcttccgcccagagcttcatcgagcggatgaccaacttcgataagaacctgcccaacgagaaggtgctgcccaagcacagcctgctgtacgagtacttcaccgtgtataacgagctgaccaaagtgaaatacgtgaccgagggaatgagaaagcccgccttcctgagcggcgagcagaaaaaggccatcgtggacctgctgttcaagaccaaccggaaagtgaccgtgaagcagctgaaagaggactacttcaagaaaatcgaggacaagaagtacagcatcggcctggccatcggcaccaactctgtgggctgggccgtgatcaccgacgagtacaaggtgcccagcaagaaattcaaggtgctgggcaacaccgaccggcacagcatcaagaagaacctgatcggagccctgctgttcgacagcggcgaaacagccgaggccacccggctgaagagaaccgccagaagaagatacaccagacggaagaaccggatctgctatctgcaagagatcttcagcaacgagatggccaaggtggacgacagcttcttccacagactggaagagtccttcctggtggaagaggataagaagcacgagcggcaccccatcttcggcaacatcgtggacgaggtggcctaccacgagaagtaccccaccatctaccacctgagaaagaaactggtggacagcaccgacaaggccgacctgcggctgatctatctggccctggcccacatgatcaagttccggggccacttcctgatcgagggcgacctgaaccccgacaacagcgacgtggacaagctgttcatccagctggtgcagacctacaaccagctgttcgaggaaaaccccatcaacgccagcggcgtggacgccaaggccatcctgtctgccagactgagcaagagcagacggctggaaaatctgatcgcccagctgcccggcgagaagaagaatggcctgttcggaaacctgattgccctgagcctgggcctgacccccaacttcaagagcaacttcgacctggccgaggatgccaaactgcagctgagcaaggacacctacgacgacgacctggacaacctgctggcccagatcggcgaccagtacgccgacctgtttctggccgccaagaacctgtccgacgccatcctgctgagcgacatcctgagagtgaacaccgagatcaccaaggcccccctgagcgcctctatgatcaagagatacgacgagcaccaccaggacctgaccctgctgaaagctctcgtgcggcagcagctgcctgagaagtacaaagagattttcttcgaccagagcaagaacggctacgccggctacattgacggcggagccagccaggaagagttctacaagttcatcaagcccatcctggaaaagatggacggcaccgaggaactgctcgtgaagctgaacagagaggacctgctgcggaagcagcggaccttcgacaacggcagcatcccccaccagatccacctgggagagctgcacgccattctgcggcggcaggaagatttttacccattcctgaaggacaaccgggaaaagatcgagaagatcctgaccttccgcatcccctactacgtgggccctctggccaggggaaacagcagattcgcctggatgaccagaaagagcgaggaaaccatcaccccctggaacttcgaggaagtggtggacaagggcgcttccgcccagagcttcatcgagcggatgaccaacttcgataagaacctgcccaacgagaaggtgctgcccaagcacagcctgctgtacgagtacttcaccgtgtataacgagctgaccaaagtgaaatacgtgaccgagggaatgagaaagcccgccttcctgagcggcgagcagaaaaaggccatcgtggacctgctgttcaagaccaaccggaaagtgaccgtgaagcagctgaaagaggactacttcaagaaaatcgagtctggcggctcaaaaagaaccgccgacggcagcgaattcgagcccaagaagaagaggaaagtc

SEQ ID NO: 223 - protein, 1853 aa, Artificial Sequence
  Synthetic
MKRTADGSEFESPKKKRKVSSETGPVAVDPTLRRRIEPHEFEVFFDPRELRKETCLLYEINWGGRHSIWRHTSQNTNKHVEVNFIEKFTTERYFCPNTRCSITWFLSWSPCGECSRAITEFLSRYPHVTLFIYIARLYHHADPRNRQGLRDLISSGVTIQIMTEQESGYCWRNFVNYSPSNEAHWPRYPHLWVRLYVLELYCIILGLPPCLNILRRKQPQLTFFTIALQSCHYQRLPPHILWATGLKSGGSSGGSSGSETPGTSESATPESSGGSSGGSDKKYSIGLAIGTNSVGWAVITDEYKVPSKKFKVLGNTDRHSIKKNLIGALLFDSGETAEATRLKRTARRRYTRRKNRICYLQEIFSNEMAKVDDSFFHRLEESFLVEEDKKHERHPIFGNIVDEVAYHEKYPTIYHLRKKLVDSTDKADLRLIYLALAHMIKFRGHFLIEGDLNPDNSDVDKLFIQLVQTYNQLFEENPINASGVDAKAILSARLSKSRRLENLIAQLPGEKKNGLFGNLIALSLGLTPNFKSNFDLAEDAKLQLSKDTYDDDLDNLLAQIGDQYADLFLAAKNLSDAILLSDILRVNTEITKAPLSASMIKRYDEHHQDLTLLKALVRQQLPEKYKEIFFDQSKNGYAGYIDGGASQEEFYKFIKPILEKMDGTEELLVKLNREDLLRKQRTFDNGSIPHQIHLGELHAILRRQEDFYPFLKDNREKIEKILTFRIPYYVGPLARGNSRFAWMTRKSEETITPWNFEEVVDKGASAQSFIERMTNFDKNLPNEKVLPKHSLLYEYFTVYNELTKVKYVTEGMRKPAFLSGEQKKAIVDLLFKTNRKVTVKQLKEDYFKKIECFDSVEISGVEDRFNASLGTYHDLLKIIKDKDFLDNEENEDILEDIVLTLTLFEDREMIEERLKTYAHLFDDKVMKQLKRRRYTGWGRLSRKLINGIRDKQSGKTILDFLKSDGFANRNFMQLIHDDSLTFKEDIQKAQVSGQGDSLHEHIANLAGSPAIKKGILQTVKVVDELVKVMGRHKPENIVIEMARENQTTQKGQKNSRERMKRIEEGIKELGSQILKEHPVENTQLQNEKLYLYYLQNGRDMYVDQELDINRLSDYDVDHIVPQSFLKDDSIDNKVLTRSDKNRGKSDNVPSEEVVKKMKNYWRQLLNAKLITQRKFDNLTKAERGGLSELDKAGFIKRQLVETRQITKHVAQILDSRMNTKYDENDKLIREVKVITLKSKLVSDFRKDFQFYKVREINNYHHAHDAYLNAVVGTALIKKYPKLESEFVYGDYKVYDVRKMIAKSEQEIGKATAKYFFYSNIMNFFKTEITLANGEIRKRPLIETNGETGEIVWDKGRDFATVRKVLSMPQVNIVKKTEVQTGGFSKESILPKRNSDKLIARKKDWDPKKYGGFDSPTVAYSVLVVAKVEKGKSKKLKSVKELLGITIMERSSFEKNPIDFLEAKGYKEVKKDLIIKLPKYSLFELENGRKRMLASAGELQKGNELALPSKYVNFLYLASHYEKLKGSPEDNEQKQLFVEQHKHYLDEIIEQISEFSKRVILADANLDKVLSAYNKHRDKPIREQAENIIHLFTLTNLGAPAAFKYFDTTIDRKRYTSTKEVLDATLIHQSITGLYETRIDLSQLGGDSGGSGGSGGSTNLSDIIEKETGKQLVIQESILMLPEEVEEVIGNKPESDILVHTAYDESTDENVMLLTSDAPEYKPWALVIQDSNGENKIKMLSGGSGGSGGSTNLSDIIEKETGKQLVIQESILMLPEEVEEVIGNKPESDILVHTAYDESTDENVMLLTSDAPEYKPWALVIQDSNGENKIKMLSGGSKRTADGSEFEPKKKRKV

SEQ ID NO: 224 - protein, 1853 aa, Artificial Sequence
  Synthetic
MKRTADGSEFESPKKKRKVSSETGPVAVDPTLRRRIEPHEFEVFFDPRELRKETCLLYEINWGGRHSIWRHTSQNTNKHVEVNFIEKFTTERYFCPNTRCSITWFLSYSPCGECSRAITEFLSRYPHVTLFIYIARLYHHADPENRQGLRDLISSGVTIQIMTEQESGYCWRNFVNYSPSNEAHWPRYPHLWVRLYVLELYCIILGLPPCLNILRRKQPQLTFFTIALQSCHYQRLPPHILWATGLKSGGSSGGSSGSETPGTSESATPESSGGSSGGSDKKYSIGLAIGTNSVGWAVITDEYKVPSKKFKVLGNTDRHSIKKNLIGALLFDSGETAEATRLKRTARRRYTRRKNRICYLQEIFSNEMAKVDDSFFHRLEESFLVEEDKKHERHPIFGNIVDEVAYHEKYPTIYHLRKKLVDSTDKADLRLIYLALAHMIKFRGHFLIEGDLNPDNSDVDKLFIQLVQTYNQLFEENPINASGVDAKAILSARLSKSRRLENLIAQLPGEKKNGLFGNLIALSLGLTPNFKSNFDLAEDAKLQLSKDTYDDDLDNLLAQIGDQYADLFLAAKNLSDAILLSDILRVNTEITKAPLSASMIKRYDEHHQDLTLLKALVRQQLPEKYKEIFFDQSKNGYAGYIDGGASQEEFYKFIKPILEKMDGTEELLVKLNREDLLRKQRTFDNGSIPHQIHLGELHAILRRQEDFYPFLKDNREKIEKILTFRIPYYVGPLARGNSRFAWMTRKSEETITPWNFEEVVDKGASAQSFIERMTNFDKNLPNEKVLPKHSLLYEYFTVYNELTKVKYVTEGMRKPAFLSGEQKKAIVDLLFKTNRKVTVKQLKEDYFKKIECFDSVEISGVEDRFNASLGTYHDLLKIIKDKDFLDNEENEDILEDIVLTLTLFEDREMIEERLKTYAHLFDDKVMKQLKRRRYTGWGRLSRKLINGIRDKQSGKTILDFLKSDGFANRNFMQLIHDDSLTFKEDIQKAQVSGQGDSLHEHIANLAGSPAIKKGILQTVKVVDELVKVMGRHKPENIVIEMARENQTTQKGQKNSRERMKRIEEGIKELGSQILKEHPVENTQLQNEKLYLYYLQNGRDMYVDQELDINRLSDYDVDHIVPQSFLKDDSIDNKVLTRSDKNRGKSDNVPSEEVVKKMKNYWRQLLNAKLITQRKFDNLTKAERGGLSELDKAGFIKRQLVETRQITKHVAQILDSRMNTKYDENDKLIREVKVITLKSKLVSDFRKDFQFYKVREINNYHHAHDAYLNAVVGTALIKKYPKLESEFVYGDYKVYDVRKMIAKSEQEIGKATAKYFFYSNIMNFFKTEITLANGEIRKRPLIETNGETGEIVWDKGRDFATVRKVLSMPQVNIVKKTEVQTGGFSKESILPKRNSDKLIARKKDWDPKKYGGFDSPTVAYSVLVVAKVEKGKSKKLKSVKELLGITIMERSSFEKNPIDFLEAKGYKEVKKDLIIKLPKYSLFELENGRKRMLASAGELQKGNELALPSKYVNFLYLASHYEKLKGSPEDNEQKQLFVEQHKHYLDEIIEQISEFSKRVILADANLDKVLSAYNKHRDKPIREQAENIIHLFTLTNLGAPAAFKYFDTTIDRKRYTSTKEVLDATLIHQSITGLYETRIDLSQLGGDSGGSGGSGGSTNLSDIIEKETGKQLVIQESILMLPEEVEEVIGNKPESDILVHTAYDESTDENVMLLTSDAPEYKPWALVIQDSNGENKIKMLSGGSGGSGGSTNLSDIIEKETGKQLVIQESILMLPEEVEEVIGNKPESDILVHTAYDESTDENVMLLTSDAPEYKPWALVIQDSNGENKIKMLSGGSKRTADGSEFEPKKKRKV

SEQ ID NO: 225 - protein, 1853 aa, Artificial Sequence
  Synthetic
MKRTADGSEFESPKKKRKVSSETGPVAVDPTLRRRIEPHEFEVFFDPRELRKETCLLYEINWGGRHSIWRHTSQNTNKHVEVNFIEKFTTERYFCPNTRCSITWFLSYSPCGECSRAITEFLSRYPHVTLFIYIARLYHHADPRNRQGLEDLISSGVTIQIMTEQESGYCWRNFVNYSPSNEAHWPRYPHLWVRLYVLELYCIILGLPPCLNILRRKQPQLTFFTIALQSCHYQRLPPHILWATGLKSGGSSGGSSGSETPGTSESATPESSGGSSGGSDKKYSIGLAIGTNSVGWAVITDEYKVPSKKFKVLGNTDRHSIKKNLIGALLFDSGETAEATRLKRTARRRYTRRKNRICYLQEIFSNEMAKVDDSFFHRLEESFLVEEDKKHERHPIFGNIVDEVAYHEKYPTIYHLRKKLVDSTDKADLRLIYLALAHMIKFRGHFLIEGDLNPDNSDVDKLFIQLVQTYNQLFEENPINASGVDAKAILSARLSKSRRLENLIAQLPGEKKNGLFGNLIALSLGLTPNFKSNFDLAEDAKLQLSKDTYDDDLDNLLAQIGDQYADLFLAAKNLSDAILLSDILRVNTEITKAPLSASMIKRYDEHHQDLTLLKALVRQQLPEKYKEIFFDQSKNGYAGYIDGGASQEEFYKFIKPILEKMDGTEELLVKLNREDLLRKQRTFDNGSIPHQIHLGELHAILRRQEDFYPFLKDNREKIEKILTFRIPYYVGPLARGNSRFAWMTRKSEETITPWNFEEVVDKGASAQSFIERMTNFDKNLPNEKVLPKHSLLYEYFTVYNELTKVKYVTEGMRKPAFLSGEQKKAIVDLLFKTNRKVTVKQLKEDYFKKIECFDSVEISGVEDRFNASLGTYHDLLKIIKDKDFLDNEENEDILEDIVLTLTLFEDREMIEERLKTYAHLFDDKVMKQLKRRRYTGWGRLSRKLINGIRDKQSGKTILDFLKSDGFANRNFMQLIHDDSLTFKEDIQKAQVSGQGDSLHEHIANLAGSPAIKKGILQTVKVVDELVKVMGRHKPENIVIEMARENQTTQKGQKNSRERMKRIEEGIKELGSQILKEHPVENTQLQNEKLYLYYLQNGRDMYVDQELDINRLSDYDVDHIVPQSFLKDDSIDNKVLTRSDKNRGKSDNVPSEEVVKKMKNYWRQLLNAKLITQRKFDNLTKAERGGLSELDKAGFIKRQLVETRQITKHVAQILDSRMNTKYDENDKLIREVKVITLKSKLVSDFRKDFQFYKVREINNYHHAHDAYLNAVVGTALIKKYPKLESEFVYGDYKVYDVRKMIAKSEQEIGKATAKYFFYSNIMNFFKTEITLANGEIRKRPLIETNGETGEIVWDKGRDFATVRKVLSMPQVNIVKKTEVQTGGFSKESILPKRNSDKLIARKKDWDPKKYGGFDSPTVAYSVLVVAKVEKGKSKKLKSVKELLGITIMERSSFEKNPIDFLEAKGYKEVKKDLIIKLPKYSLFELENGRKRMLASAGELQKGNELALPSKYVNFLYLASHYEKLKGSPEDNEQKQLFVEQHKHYLDEIIEQISEFSKRVILADANLDKVLSAYNKHRDKPIREQAENIIHLFTLTNLGAPAAFKYFDTTIDRKRYTSTKEVLDATLIHQSITGLYETRIDLSQLGGDSGGSGGSGGSTNLSDIIEKETGKQLVIQESILMLPEEVEEVIGNKPESDILVHTAYDESTDENVMLLTSDAPEYKPWALVIQDSNGENKIKMLSGGSGGSGGSTNLSDIIEKETGKQLVIQESILMLPEEVEEVIGNKPESDILVHTAYDESTDENVMLLTSDAPEYKPWALVIQDSNGENKIKMLSGGSKRTADGSEFEPKKKRKV

SEQ ID NO: 226 - protein, 1853 aa, Artificial Sequence
  Synthetic
MKRTADGSEFESPKKKRKVSSETGPVAVDPTLRRRIEPHEFEVFFDPRELRKETCLLYEINWGGRHSIWRHTSQNTNKHVEVNFIEKFTTERYFCPNTRCSITWFLSYSPCGECSRAITEFLSRYPHVTLFIYIARLYHHADPENRQGLEDLISSGVTIQIMTEQESGYCWRNFVNYSPSNEAHWPRYPHLWVRLYVLELYCIILGLPPCLNILRRKQPQLTFFTIALQSCHYQRLPPHILWATGLKSGGSSGGSSGSETPGTSESATPESSGGSSGGSDKKYSIGLAIGTNSVGWAVITDEYKVPSKKFKVLGNTDRHSIKKNLIGALLFDSGETAEATRLKRTARRRYTRRKNRICYLQEIFSNEMAKVDDSFFHRLEESFLVEEDKKHERHPIFGNIVDEVAYHEKYPTIYHLRKKLVDSTDKADLRLIYLALAHMIKFRGHFLIEGDLNPDNSDVDKLFIQLVQTYNQLFEENPINASGVDAKAILSARLSKSRRLENLIAQLPGEKKNGLFGNLIALSLGLTPNFKSNFDLAEDAKLQLSKDTYDDDLDNLLAQIGDQYADLFLAAKNLSDAILLSDILRVNTEITKAPLSASMIKRYDEHHQDLTLLKALVRQQLPEKYKEIFFDQSKNGYAGYIDGGASQEEFYKFIKPILEKMDGTEELLVKLNREDLLRKQRTFDNGSIPHQIHLGELHAILRRQEDFYPFLKDNREKIEKILTFRIPYYVGPLARGNSRFAWMTRKSEETITPWNFEEVVDKGASAQSFIERMTNFDKNLPNEKVLPKHSLLYEYFTVYNELTKVKYVTEGMRKPAFLSGEQKKAIVDLLFKTNRKVTVKQLKEDYFKKIECFDSVEISGVEDRFNASLGTYHDLLKIIKDKDFLDNEENEDILEDIVLTLTLFEDREMIEERLKTYAHLFDDKVMKQLKRRRYTGWGRLSRKLINGIRDKQSGKTILDFLKSDGFANRNFMQLIHDDSLTFKEDIQKAQVSGQGDSLHEHIANLAGSPAIKKGILQTVKVVDELVKVMGRHKPENIVIEMARENQTTQKGQKNSRERMKRIEEGIKELGSQILKEHPVENTQLQNEKLYLYYLQNGRDMYVDQELDINRLSDYDVDHIVPQSFLKDDSIDNKVLTRSDKNRGKSDNVPSEEVVKKMKNYWRQLLNAKLITQRKFDNLTKAERGGLSELDKAGFIKRQLVETRQITKHVAQILDSRMNTKYDENDKLIREVKVITLKSKLVSDFRKDFQFYKVREINNYHHAHDAYLNAVVGTALIKKYPKLESEFVYGDYKVYDVRKMIAKSEQEIGKATAKYFFYSNIMNFFKTEITLANGEIRKRPLIETNGETGEIVWDKGRDFATVRKVLSMPQVNIVKKTEVQTGGFSKESILPKRNSDKLIARKKDWDPKKYGGFDSPTVAYSVLVVAKVEKGKSKKLKSVKELLGITIMERSSFEKNPIDFLEAKGYKEVKKDLIIKLPKYSLFELENGRKRMLASAGELQKGNELALPSKYVNFLYLASHYEKLKGSPEDNEQKQLFVEQHKHYLDEIIEQISEFSKRVILADANLDKVLSAYNKHRDKPIREQAENIIHLFTLTNLGAPAAFKYFDTTIDRKRYTSTKEVLDATLIHQSITGLYETRIDLSQLGGDSGGSGGSGGSTNLSDIIEKETGKQLVIQESILMLPEEVEEVIGNKPESDILVHTAYDESTDENVMLLTSDAPEYKPWALVIQDSNGENKIKMLSGGSGGSGGSTNLSDIIEKETGKQLVIQESILMLPEEVEEVIGNKPESDILVHTAYDESTDENVMLLTSDAPEYKPWALVIQDSNGENKIKMLSGGSKRTADGSEFEPKKKRKV

SEQ ID NO: 227 - protein, 1853 aa, Artificial Sequence
  Synthetic
MKRTADGSEFESPKKKRKVSSETGPVAVDPTLRRRIEPHEFEVFFDPRELRKETCLLYEINWGGRHSIWRHTSQNTNKHVEVNFIEKFTTERYFCPNTRCSITWFLSWSPCGECSRAITEFLSRYPHVTLFIYIARLYHHADPENRQGLEDLISSGVTIQIMTEQESGYCWRNFVNYSPSNEAHWPRYPHLWVRLYVLELYCIILGLPPCLNILRRKQPQLTFFTIALQSCHYQRLPPHILWATGLKSGGSSGGSSGSETPGTSESATPESSGGSSGGSDKKYSIGLAIGTNSVGWAVITDEYKVPSKKFKVLGNTDRHSIKKNLIGALLFDSGETAEATRLKRTARRRYTRRKNRICYLQEIFSNEMAKVDDSFFHRLEESFLVEEDKKHERHPIFGNIVDEVAYHEKYPTIYHLRKKLVDSTDKADLRLIYLALAHMIKFRGHFLIEGDLNPDNSDVDKLFIQLVQTYNQLFEENPINASGVDAKAILSARLSKSRRLENLIAQLPGEKKNGLFGNLIALSLGLTPNFKSNFDLAEDAKLQLSKDTYDDDLDNLLAQIGDQYADLFLAAKNLSDAILLSDILRVNTEITKAPLSASMIKRYDEHHQDLTLLKALVRQQLPEKYKEIFFDQSKNGYAGYIDGGASQEEFYKFIKPILEKMDGTEELLVKLNREDLLRKQRTFDNGSIPHQIHLGELHAILRRQEDFYPFLKDNREKIEKILTFRIPYYVGPLARGNSRFAWMTRKSEETITPWNFEEVVDKGASAQSFIERMTNFDKNLPNEKVLPKHSLLYEYFTVYNELTKVKYVTEGMRKPAFLSGEQKKAIVDLLFKTNRKVTVKQLKEDYFKKIECFDSVEISGVEDRFNASLGTYHDLLKIIKDKDFLDNEENEDILEDIVLTLTLFEDREMIEERLKTYAHLFDDKVMKQLKRRRYTGWGRLSRKLINGIRDKQSGKTILDFLKSDGFANRNFMQLIHDDSLTFKEDIQKAQVSGQGDSLHEHIANLAGSPAIKKGILQTVKVVDELVKVMGRHKPENIVIEMARENQTTQKGQKNSRERMKRIEEGIKELGSQILKEHPVENTQLQNEKLYLYYLQNGRDMYVDQELDINRLSDYDVDHIVPQSFLKDDSIDNKVLTRSDKNRGKSDNVPSEEVVKKMKNYWRQLLNAKLITQRKFDNLTKAERGGLSELDKAGFIKRQLVETRQITKHVAQILDSRMNTKYDENDKLIREVKVITLKSKLVSDFRKDFQFYKVREINNYHHAHDAYLNAVVGTALIKKYPKLESEFVYGDYKVYDVRKMIAKSEQEIGKATAKYFFYSNIMNFFKTEITLANGEIRKRPLIETNGETGEIVWDKGRDFATVRKVLSMPQVNIVKKTEVQTGGFSKESILPKRNSDKLIARKKDWDPKKYGGFDSPTVAYSVLVVAKVEKGKSKKLKSVKELLGITIMERSSFEKNPIDFLEAKGYKEVKKDLIIKLPKYSLFELENGRKRMLASAGELQKGNELALPSKYVNFLYLASHYEKLKGSPEDNEQKQLFVEQHKHYLDEIIEQISEFSKRVILADANLDKVLSAYNKHRDKPIREQAENIIHLFTLTNLGAPAAFKYFDTTIDRKRYTSTKEVLDATLIHQSITGLYETRIDLSQLGGDSGGSGGSGGSTNLSDIIEKETGKQLVIQESILMLPEEVEEVIGNKPESDILVHTAYDESTDENVMLLTSDAPEYKPWALVIQDSNGENKIKMLSGGSGGSGGSTNLSDIIEKETGKQLVIQESILMLPEEVEEVIGNKPESDILVHTAYDESTDENVMLLTSDAPEYKPWALVIQDSNGENKIKMLSGGSKRTADGSEFEPKKKRKV

SEQ ID NO: 228 - protein, 1853 aa, Artificial Sequence
  Synthetic
MKRTADGSEFESPKKKRKVSSETGPVAVDPTLRRRIEPHEFEVFFDPRELAKETCLLYEINWGGRHSIWRHTSQNTNKHVEVNFIEKFTTERYFCPNTRCSITWFLSWSPCGECSRAITEFLSRYPHVTLFIYIARLYHHADPRNRQGLRDLISSGVTIQIMTEQESGYCWRNFVNYSPSNEAHWPRYPHLWVRLYVLELYCIILGLPPCLNILRRKQPQLTFFTIALQSCHYQRLPPHILWATGLKSGGSSGGSSGSETPGTSESATPESSGGSSGGSDKKYSIGLAIGTNSVGWAVITDEYKVPSKKFKVLGNTDRHSIKKNLIGALLFDSGETAEATRLKRTARRRYTRRKNRICYLQEIFSNEMAKVDDSFFHRLEESFLVEEDKKHERHPIFGNIVDEVAYHEKYPTIYHLRKKLVDSTDKADLRLIYLALAHMIKFRGHFLIEGDLNPDNSDVDKLFIQLVQTYNQLFEENPINASGVDAKAILSARLSKSRRLENLIAQLPGEKKNGLFGNLIALSLGLTPNFKSNFDLAEDAKLQLSKDTYDDDLDNLLAQIGDQYADLFLAAKNLSDAILLSDILRVNTEITKAPLSASMIKRYDEHHQDLTLLKALVRQQLPEKYKEIFFDQSKNGYAGYIDGGASQEEFYKFIKPILEKMDGTEELLVKLNREDLLRKQRTFDNGSIPHQIHLGELHAILRRQEDFYPFLKDNREKIEKILTFRIPYYVGPLARGNSRFAWMTRKSEETITPWNFEEVVDKGASAQSFIERMTNFDKNLPNEKVLPKHSLLYEYFTVYNELTKVKYVTEGMRKPAFLSGEQKKAIVDLLFKTNRKVTVKQLKEDYFKKIECFDSVEISGVEDRFNASLGTYHDLLKIIKDKDFLDNEENEDILEDIVLTLTLFEDREMIEERLKTYAHLFDDKVMKQLKRRRYTGWGRLSRKLINGIRDKQSGKTILDFLKSDGFANRNFMQLIHDDSLTFKEDIQKAQVSGQGDSLHEHIANLAGSPAIKKGILQTVKVVDELVKVMGRHKPENIVIEMARENQTTQKGQKNSRERMKRIEEGIKELGSQILKEHPVENTQLQNEKLYLYYLQNGRDMYVDQELDINRLSDYDVDHIVPQSFLKDDSIDNKVLTRSDKNRGKSDNVPSEEVVKKMKNYWRQLLNAKLITQRKFDNLTKAERGGLSELDKAGFIKRQLVETRQITKHVAQILDSRMNTKYDENDKLIREVKVITLKSKLVSDFRKDFQFYKVREINNYHHAHDAYLNAVVGTALIKKYPKLESEFVYGDYKVYDVRKMIAKSEQEIGKATAKYFFYSNIMNFFKTEITLANGEIRKRPLIETNGETGEIVWDKGRDFATVRKVLSMPQVNIVKKTEVQTGGFSKESILPKRNSDKLIARKKDWDPKKYGGFDSPTVAYSVLVVAKVEKGKSKKLKSVKELLGITIMERSSFEKNPIDFLEAKGYKEVKKDLIIKLPKYSLFELENGRKRMLASAGELQKGNELALPSKYVNFLYLASHYEKLKGSPEDNEQKQLFVEQHKHYLDEIIEQISEFSKRVILADANLDKVLSAYNKHRDKPIREQAENIIHLFTLTNLGAPAAFKYFDTTIDRKRYTSTKEVLDATLIHQSITGLYETRIDLSQLGGDSGGSGGSGGSTNLSDIIEKETGKQLVIQESILMLPEEVEEVIGNKPESDILVHTAYDESTDENVMLLTSDAPEYKPWALVIQDSNGENKIKMLSGGSGGSGGSTNLSDIIEKETGKQLVIQESILMLPEEVEEVIGNKPESDILVHTAYDESTDENVMLLTSDAPEYKPWALVIQDSNGENKIKMLSGGSKRTADGSEFEPKKKRKV

SEQ ID NO: 229 - protein, 1853 aa, Artificial Sequence
  Synthetic
MKRTADGSEFESPKKKRKVSSETGPVAVDPTLRRRIEPHEFEVFFDPRELAAETCLLYEINWGGRHSIWRHTSQNTNKHVEVNFIEKFTTERYFCPNTRCSITWFLSWSPCGECSRAITEFLSRYPHVTLFIYIARLYHHADPRNRQGLRDLISSGVTIQIMTEQESGYCWRNFVNYSPSNEAHWPRYPHLWVRLYVLELYCIILGLPPCLNILRRKQPQLTFFTIALQSCHYQRLPPHILWATGLKSGGSSGGSSGSETPGTSESATPESSGGSSGGSDKKYSIGLAIGTNSVGWAVITDEYKVPSKKFKVLGNTDRHSIKKNLIGALLFDSGETAEATRLKRTARRRYTRRKNRICYLQEIFSNEMAKVDDSFFHRLEESFLVEEDKKHERHPIFGNIVDEVAYHEKYPTIYHLRKKLVDSTDKADLRLIYLALAHMIKFRGHFLIEGDLNPDNSDVDKLFIQLVQTYNQLFEENPINASGVDAKAILSARLSKSRRLENLIAQLPGEKKNGLFGNLIALSLGLTPNFKSNFDLAEDAKLQLSKDTYDDDLDNLLAQIGDQYADLFLAAKNLSDAILLSDILRVNTEITKAPLSASMIKRYDEHHQDLTLLKALVRQQLPEKYKEIFFDQSKNGYAGYIDGGASQEEFYKFIKPILEKMDGTEELLVKLNREDLLRKQRTFDNGSIPHQIHLGELHAILRRQEDFYPFLKDNREKIEKILTFRIPYYVGPLARGNSRFAWMTRKSEETITPWNFEEVVDKGASAQSFIERMTNFDKNLPNEKVLPKHSLLYEYFTVYNELTKVKYVTEGMRKPAFLSGEQKKAIVDLLFKTNRKVTVKQLKEDYFKKIECFDSVEISGVEDRFNASLGTYHDLLKIIKDKDFLDNEENEDILEDIVLTLTLFEDREMIEERLKTYAHLFDDKVMKQLKRRRYTGWGRLSRKLINGIRDKQSGKTILDFLKSDGFANRNFMQLIHDDSLTFKEDIQKAQVSGQGDSLHEHIANLAGSPAIKKGILQTVKVVDELVKVMGRHKPENIVIEMARENQTTQKGQKNSRERMKRIEEGIKELGSQILKEHPVENTQLQNEKLYLYYLQNGRDMYVDQELDINRLSDYDVDHIVPQSFLKDDSIDNKVLTRSDKNRGKSDNVPSEEVVKKMKNYWRQLLNAKLITQRKFDNLTKAERGGLSELDKAGFIKRQLVETRQITKHVAQILDSRMNTKYDENDKLIREVKVITLKSKLVSDFRKDFQFYKVREINNYHHAHDAYLNAVVGTALIKKYPKLESEFVYGDYKVYDVRKMIAKSEQEIGKATAKYFFYSNIMNFFKTEITLANGEIRKRPLIETNGETGEIVWDKGRDFATVRKVLSMPQVNIVKKTEVQTGGFSKESILPKRNSDKLIARKKDWDPKKYGGFDSPTVAYSVLVVAKVEKGKSKKLKSVKELLGITIMERSSFEKNPIDFLEAKGYKEVKKDLIIKLPKYSLFELENGRKRMLASAGELQKGNELALPSKYVNFLYLASHYEKLKGSPEDNEQKQLFVEQHKHYLDEIIEQISEFSKRVILADANLDKVLSAYNKHRDKPIREQAENIIHLFTLTNLGAPAAFKYFDTTIDRKRYTSTKEVLDATLIHQSITGLYETRIDLSQLGGDSGGSGGSGGSTNLSDIIEKETGKQLVIQESILMLPEEVEEVIGNKPESDILVHTAYDESTDENVMLLTSDAPEYKPWALVIQDSNGENKIKMLSGGSGGSGGSTNLSDIIEKETGKQLVIQESILMLPEEVEEVIGNKPESDILVHTAYDESTDENVMLLTSDAPEYKPWALVIQDSNGENKIKMLSGGSKRTADGSEFEPKKKRKV

SEQ ID NO: 230 - protein, 1824 aa, Artificial Sequence
  Synthetic
MKRTADGSEFESPKKKRKVSEASPASGPRHLMDPHIFTSNFNNGIGRHKTYLCYEVERLDNGTSVKMDQHRGFLHNQAKNLLCGFYGRHAELRFLDLVPSLQLDPAQIYRVTWFISWSPCFSWGCAGEVRAFLQENTHVRLRIFAARIYDYDPLYKEALQMLRDAGAQVSIMTYDEFKHCWDTFVDHQGCPFQPWDGLDEHSQALSGRLRAILQNQGNSGGSSGGSSGSETPGTSESATPESSGGSSGGSDKKYSIGLAIGTNSVGWAVITDEYKVPSKKFKVLGNTDRHSIKKNLIGALLFDSGETAEATRLKRTARRRYTRRKNRICYLQEIFSNEMAKVDDSFFHRLEESFLVEEDKKHERHPIFGNIVDEVAYHEKYPTIYHLRKKLVDSTDKADLRLIYLALAHMIKFRGHFLIEGDLNPDNSDVDKLFIQLVQTYNQLFEENPINASGVDAKAILSARLSKSRRLENLIAQLPGEKKNGLFGNLIALSLGLTPNFKSNFDLAEDAKLQLSKDTYDDDLDNLLAQIGDQYADLFLAAKNLSDAILLSDILRVNTEITKAPLSASMIKRYDEHHQDLTLLKALVRQQLPEKYKEIFFDQSKNGYAGYIDGGASQEEFYKFIKPILEKMDGTEELLVKLNREDLLRKQRTFDNGSIPHQIHLGELHAILRRQEDFYPFLKDNREKIEKILTFRIPYYVGPLARGNSRFAWMTRKSEETITPWNFEEVVDKGASAQSFIERMTNFDKNLPNEKVLPKHSLLYEYFTVYNELTKVKYVTEGMRKPAFLSGEQKKAIVDLLFKTNRKVTVKQLKEDYFKKIECFDSVEISGVEDRFNASLGTYHDLLKIIKDKDFLDNEENEDILEDIVLTLTLFEDREMIEERLKTYAHLFDDKVMKQLKRRRYTGWGRLSRKLINGIRDKQSGKTILDFLKSDGFANRNFMQLIHDDSLTFKEDIQKAQVSGQGDSLHEHIANLAGSPAIKKGILQTVKVVDELVKVMGRHKPENIVIEMARENQTTQKGQKNSRERMKRIEEGIKELGSQILKEHPVENTQLQNEKLYLYYLQNGRDMYVDQELDINRLSDYDVDHIVPQSFLKDDSIDNKVLTRSDKNRGKSDNVPSEEVVKKMKNYWRQLLNAKLITQRKFDNLTKAERGGLSELDKAGFIKRQLVETRQITKHVAQILDSRMNTKYDENDKLIREVKVITLKSKLVSDFRKDFQFYKVREINNYHHAHDAYLNAVVGTALIKKYPKLESEFVYGDYKVYDVRKMIAKSEQEIGKATAKYFFYSNIMNFFKTEITLANGEIRKRPLIETNGETGEIVWDKGRDFATVRKVLSMPQVNIVKKTEVQTGGFSKESILPKRNSDKLIARKKDWDPKKYGGFDSPTVAYSVLVVAKVEKGKSKKLKSVKELLGITIMERSSFEKNPIDFLEAKGYKEVKKDLIIKLPKYSLFELENGRKRMLASAGELQKGNELALPSKYVNFLYLASHYEKLKGSPEDNEQKQLFVEQHKHYLDEIIEQISEFSKRVILADANLDKVLSAYNKHRDKPIREQAENIIHLFTLTNLGAPAAFKYFDTTIDRKRYTSTKEVLDATLIHQSITGLYETRIDLSQLGGDSGGSGGSGGSTNLSDIIEKETGKQLVIQESILMLPEEVEEVIGNKPESDILVHTAYDESTDENVMLLTSDAPEYKPWALVIQDSNGENKIKMLSGGSGGSGGSTNLSDIIEKETGKQLVIQESILMLPEEVEEVIGNKPESDILVHTAYDESTDENVMLLTSDAPEYKPWALVIQDSNGENKIKMLSGGSKRTADGSEFEPKKKRKV

SEQ ID NO: 231 - protein, 2006 aa, Artificial Sequence
  Synthetic
MKRTADGSEFESPKKKRKVNPQIRNPMERMYRDTFYDNFENEPILYGRSYTWLCYEVKIKRGRSNLLWDTGVFRGQVYFKPQYHAEMCFLSWFCGNQLPAYKCFQITWFVSWTPCPDCVAKLAEFLSEHPNVTLTISAARLYYYWERDYRRALCRLSQAGARVTIMDYEEFAYCWENFVYNEGQQFMPWYKFDENYAFLHRTLKEILRYLMDPDTFTFNFNNDPLVLRRRQTYLCYEVERLDNGTWVLMDQHMGFLCNEAKNLLCGFYGRHAELRFLDLVPSLQLDPAQIYRVTWFISWSPCFSWGCAGEVRAFLQENTHVRLRIFAARIYDYDPLYKEALQMLRDAGAQVSIMTYDEFEYCWDTFVYRQGCPFQPWDGLEEHSQALSGRLRAILQNQGNSGGSSGGSSGSETPGTSESATPESSGGSSGGSDKKYSIGLAIGTNSVGWAVITDEYKVPSKKFKVLGNTDRHSIKKNLIGALLFDSGETAEATRLKRTARRRYTRRKNRICYLQEIFSNEMAKVDDSFFHRLEESFLVEEDKKHERHPIFGNIVDEVAYHEKYPTIYHLRKKLVDSTDKADLRLIYLALAHMIKFRGHFLIEGDLNPDNSDVDKLFIQLVQTYNQLFEENPINASGVDAKAILSARLSKSRRLENLIAQLPGEKKNGLFGNLIALSLGLTPNFKSNFDLAEDAKLQLSKDTYDDDLDNLLAQIGDQYADLFLAAKNLSDAILLSDILRVNTEITKAPLSASMIKRYDEHHQDLTLLKALVRQQLPEKYKEIFFDQSKNGYAGYIDGGASQEEFYKFIKPILEKMDGTEELLVKLNREDLLRKQRTFDNGSIPHQIHLGELHAILRRQEDFYPFLKDNREKIEKILTFRIPYYVGPLARGNSRFAWMTRKSEETITPWNFEEVVDKGASAQSFIERMTNFDKNLPNEKVLPKHSLLYEYFTVYNELTKVKYVTEGMRKPAFLSGEQKKAIVDLLFKTNRKVTVKQLKEDYFKKIECFDSVEISGVEDRFNASLGTYHDLLKIIKDKDFLDNEENEDILEDIVLTLTLFEDREMIEERLKTYAHLFDDKVMKQLKRRRYTGWGRLSRKLINGIRDKQSGKTILDFLKSDGFANRNFMQLIHDDSLTFKEDIQKAQVSGQGDSLHEHIANLAGSPAIKKGILQTVKVVDELVKVMGRHKPENIVIEMARENQTTQKGQKNSRERMKRIEEGIKELGSQILKEHPVENTQLQNEKLYLYYLQNGRDMYVDQELDINRLSDYDVDHIVPQSFLKDDSIDNKVLTRSDKNRGKSDNVPSEEVVKKMKNYWRQLLNAKLITQRKFDNLTKAERGGLSELDKAGFIKRQLVETRQITKHVAQILDSRMNTKYDENDKLIREVKVITLKSKLVSDFRKDFQFYKVREINNYHHAHDAYLNAVVGTALIKKYPKLESEFVYGDYKVYDVRKMIAKSEQEIGKATAKYFFYSNIMNFFKTEITLANGEIRKRPLIETNGETGEIVWDKGRDFATVRKVLSMPQVNIVKKTEVQTGGFSKESILPKRNSDKLIARKKDWDPKKYGGFDSPTVAYSVLVVAKVEKGKSKKLKSVKELLGITIMERSSFEKNPIDFLEAKGYKEVKKDLIIKLPKYSLFELENGRKRMLASAGELQKGNELALPSKYVNFLYLASHYEKLKGSPEDNEQKQLFVEQHKHYLDEIIEQISEFSKRVILADANLDKVLSAYNKHRDKPIREQAENIIHLFTLTNLGAPAAFKYFDTTIDRKRYTSTKEVLDATLIHQSITGLYETRIDLSQLGGDSGGSGGSGGSTNLSDIIEKETGKQLVIQESILMLPEEVEEVIGNKPESDILVHTAYDESTDENVMLLTSDAPEYKPWALVIQDSNGENKIKMLSGGSGGSGGSTNLSDIIEKETGKQLVIQESILMLPEEVEEVIGNKPESDILVHTAYDESTDENVMLLTSDAPEYKPWALVIQDSNGENKIKMLSGGSKRTADGSEFEPKKKRKV

SEQ ID NO: 232 - protein, 2008 aa, Artificial Sequence
  Synthetic
MKRTADGSEFESPKKKRKVKPHFRNTVERMYRDTFSYNFYNRPILSRRNTVWLCYEVKTKGPSRPPLDAKIFRGQVYSELKYHPEMRFFHWFSKWRKLHRDQEYEVTWYISWSPCTKCTRDMATFLAEDPKVTLTIFVARLYYFWDPDYQEALRSLCQKRDGPRATMKIMNYDEFQHCWSKFVYSQRELFEPWNNLPKYYILLHIMLGEILRHSMDPPTFTFNFNNEPWVRGRHETYLCYEVERMHNDTWVLLNQRRGFLCNQAPHKHGFLEGRHAELCFLDVIPFWKLDLDQDYRVTCFTSWSPCFSCAQEMAKFISKNKHVSLCIFTARIYDDQGRCQEGLRTLAEAGAKISIMTYSEFKHCWDTFVDHQGCPFQPWDGLDEHSQDLSGRLRAILQNQENSGGSSGGSSGSETPGTSESATPESSGGSSGGSDKKYSIGLAIGTNSVGWAVITDEYKVPSKKFKVLGNTDRHSIKKNLIGALLFDSGETAEATRLKRTARRRYTRRKNRICYLQEIFSNEMAKVDDSFFHRLEESFLVEEDKKHERHPIFGNIVDEVAYHEKYPTIYHLRKKLVDSTDKADLRLIYLALAHMIKFRGHFLIEGDLNPDNSDVDKLFIQLVQTYNQLFEENPINASGVDAKAILSARLSKSRRLENLIAQLPGEKKNGLFGNLIALSLGLTPNFKSNFDLAEDAKLQLSKDTYDDDLDNLLAQIGDQYADLFLAAKNLSDAILLSDILRVNTEITKAPLSASMIKRYDEHHQDLTLLKALVRQQLPEKYKEIFFDQSKNGYAGYIDGGASQEEFYKFIKPILEKMDGTEELLVKLNREDLLRKQRTFDNGSIPHQIHLGELHAILRRQEDFYPFLKDNREKIEKILTFRIPYYVGPLARGNSRFAWMTRKSEETITPWNFEEVVDKGASAQSFIERMTNFDKNLPNEKVLPKHSLLYEYFTVYNELTKVKYVTEGMRKPAFLSGEQKKAIVDLLFKTNRKVTVKQLKEDYFKKIECFDSVEISGVEDRFNASLGTYHDLLKIIKDKDFLDNEENEDILEDIVLTLTLFEDREMIEERLKTYAHLFDDKVMKQLKRRRYTGWGRLSRKLINGIRDKQSGKTILDFLKSDGFANRNFMQLIHDDSLTFKEDIQKAQVSGQGDSLHEHIANLAGSPAIKKGILQTVKVVDELVKVMGRHKPENIVIEMARENQTTQKGQKNSRERMKRIEEGIKELGSQILKEHPVENTQLQNEKLYLYYLQNGRDMYVDQELDINRLSDYDVDHIVPQSFLKDDSIDNKVLTRSDKNRGKSDNVPSEEVVKKMKNYWRQLLNAKLITQRKFDNLTKAERGGLSELDKAGFIKRQLVETRQITKHVAQILDSRMNTKYDENDKLIREVKVITLKSKLVSDFRKDFQFYKVREINNYHHAHDAYLNAVVGTALIKKYPKLESEFVYGDYKVYDVRKMIAKSEQEIGKATAKYFFYSNIMNFFKTEITLANGEIRKRPLIETNGETGEIVWDKGRDFATVRKVLSMPQVNIVKKTEVQTGGFSKESILPKRNSDKLIARKKDWDPKKYGGFDSPTVAYSVLVVAKVEKGKSKKLKSVKELLGITIMERSSFEKNPIDFLEAKGYKEVKKDLIIKLPKYSLFELENGRKRMLASAGELQKGNELALPSKYVNFLYLASHYEKLKGSPEDNEQKQLFVEQHKHYLDEIIEQISEFSKRVILADANLDKVLSAYNKHRDKPIREQAENIIHLFTLTNLGAPAAFKYFDTTIDRKRYTSTKEVLDATLIHQSITGLYETRIDLSQLGGDSGGSGGSGGSTNLSDIIEKETGKQLVIQESILMLPEEVEEVIGNKPESDILVHTAYDESTDENVMLLTSDAPEYKPWALVIQDSNGENKIKMLSGGSGGSGGSTNLSDIIEKETGKQLVIQESILMLPEEVEEVIGNKPESDILVHTAYDESTDENVMLLTSDAPEYKPWALVIQDSNGENKIKMLSGGSKRTADGSEFEPKKKRKV

SEQ ID NO: 233 - protein, 1822 aa, Artificial Sequence
  Synthetic
MKRTADGSEFESPKKKRKVDSLLMNRRKFLYQFKNVRWAKGRRETYLCYVVKRRDSATSFSLDFGYLRNKNGCHVELLFLRYISDWDLDPGRCYRVTWFTSWSPCYDCARHVADFLRGNPNLSLRIFTARLYFCEDRKAEPEGLRRLHRAGVQIAIMTFKDYFYCWNTFVENHERTFKAWEGLHENSVRLSRQLRRILLPLYEVDDLRDAFRTLGLSGGSSGGSSGSETPGTSESATPESSGGSSGGSDKKYSIGLAIGTNSVGWAVITDEYKVPSKKFKVLGNTDRHSIKKNLIGALLFDSGETAEATRLKRTARRRYTRRKNRICYLQEIFSNEMAKVDDSFFHRLEESFLVEEDKKHERHPIFGNIVDEVAYHEKYPTIYHLRKKLVDSTDKADLRLIYLALAHMIKFRGHFLIEGDLNPDNSDVDKLFIQLVQTYNQLFEENPINASGVDAKAILSARLSKSRRLENLIAQLPGEKKNGLFGNLIALSLGLTPNFKSNFDLAEDAKLQLSKDTYDDDLDNLLAQIGDQYADLFLAAKNLSDAILLSDILRVNTEITKAPLSASMIKRYDEHHQDLTLLKALVRQQLPEKYKEIFFDQSKNGYAGYIDGGASQEEFYKFIKPILEKMDGTEELLVKLNREDLLRKQRTFDNGSIPHQIHLGELHAILRRQEDFYPFLKDNREKIEKILTFRIPYYVGPLARGNSRFAWMTRKSEETITPWNFEEVVDKGASAQSFIERMTNFDKNLPNEKVLPKHSLLYEYFTVYNELTKVKYVTEGMRKPAFLSGEQKKAIVDLLFKTNRKVTVKQLKEDYFKKIECFDSVEISGVEDRFNASLGTYHDLLKIIKDKDFLDNEENEDILEDIVLTLTLFEDREMIEERLKTYAHLFDDKVMKQLKRRRYTGWGRLSRKLINGIRDKQSGKTILDFLKSDGFANRNFMQLIHDDSLTFKEDIQKAQVSGQGDSLHEHIANLAGSPAIKKGILQTVKVVDELVKVMGRHKPENIVIEMARENQTTQKGQKNSRERMKRIEEGIKELGSQILKEHPVENTQLQNEKLYLYYLQNGRDMYVDQELDINRLSDYDVDHIVPQSFLKDDSIDNKVLTRSDKNRGKSDNVPSEEVVKKMKNYWRQLLNAKLITQRKFDNLTKAERGGLSELDKAGFIKRQLVETRQITKHVAQILDSRMNTKYDENDKLIREVKVITLKSKLVSDFRKDFQFYKVREINNYHHAHDAYLNAVVGTALIKKYPKLESEFVYGDYKVYDVRKMIAKSEQEIGKATAKYFFYSNIMNFFKTEITLANGEIRKRPLIETNGETGEIVWDKGRDFATVRKVLSMPQVNIVKKTEVQTGGFSKESILPKRNSDKLIARKKDWDPKKYGGFDSPTVAYSVLVVAKVEKGKSKKLKSVKELLGITIMERSSFEKNPIDFLEAKGYKEVKKDLIIKLPKYSLFELENGRKRMLASAGELQKGNELALPSKYVNFLYLASHYEKLKGSPEDNEQKQLFVEQHKHYLDEIIEQISEFSKRVILADANLDKVLSAYNKHRDKPIREQAENIIHLFTLTNLGAPAAFKYFDTTIDRKRYTSTKEVLDATLIHQSITGLYETRIDLSQLGGDSGGSGGSGGSTNLSDIIEKETGKQLVIQESILMLPEEVEEVIGNKPESDILVHTAYDESTDENVMLLTSDAPEYKPWALVIQDSNGENKIKMLSGGSGGSGGSTNLSDIIEKETGKQLVIQESILMLPEEVEEVIGNKPESDILVHTAYDESTDENVMLLTSDAPEYKPWALVIQDSNGENKIKMLSGGSKRTADGSEFEPKKKRKV

SEQ ID NO: 234 - protein, 1832 aa, Artificial Sequence
  Synthetic
MKRTADGSEFESPKKKRKVTDAEYVRIHEKLDIYTFKKQFFNNKKSVSHRCYVLFELKRRGERRACFWGYAVNKPQSGTERGIHAEIFSIRKVEEYLRDNPGQFTINWYSSWSPCADCAEKILEWYNQELRGNGHTLKIWACKLYYEKNARNQIGLWNLRDNGVGLNVMVSEHYQCCRKIFIQSSHNQLNENRWLEKTLKRAEKRRSELSIMIQVKILHTTKSPAVSGGSSGGSSGSETPGTSESATPESSGGSSGGSDKKYSIGLAIGTNSVGWAVITDEYKVPSKKFKVLGNTDRHSIKKNLIGALLFDSGETAEATRLKRTARRRYTRRKNRICYLQEIFSNEMAKVDDSFFHRLEESFLVEEDKKHERHPIFGNIVDEVAYHEKYPTIYHLRKKLVDSTDKADLRLIYLALAHMIKFRGHFLIEGDLNPDNSDVDKLFIQLVQTYNQLFEENPINASGVDAKAILSARLSKSRRLENLIAQLPGEKKNGLFGNLIALSLGLTPNFKSNFDLAEDAKLQLSKDTYDDDLDNLLAQIGDQYADLFLAAKNLSDAILLSDILRVNTEITKAPLSASMIKRYDEHHQDLTLLKALVRQQLPEKYKEIFFDQSKNGYAGYIDGGASQEEFYKFIKPILEKMDGTEELLVKLNREDLLRKQRTFDNGSIPHQIHLGELHAILRRQEDFYPFLKDNREKIEKILTFRIPYYVGPLARGNSRFAWMTRKSEETITPWNFEEVVDKGASAQSFIERMTNFDKNLPNEKVLPKHSLLYEYFTVYNELTKVKYVTEGMRKPAFLSGEQKKAIVDLLFKTNRKVTVKQLKEDYFKKIECFDSVEISGVEDRFNASLGTYHDLLKIIKDKDFLDNEENEDILEDIVLTLTLFEDREMIEERLKTYAHLFDDKVMKQLKRRRYTGWGRLSRKLINGIRDKQSGKTILDFLKSDGFANRNFMQLIHDDSLTFKEDIQKAQVSGQGDSLHEHIANLAGSPAIKKGILQTVKVVDELVKVMGRHKPENIVIEMARENQTTQKGQKNSRERMKRIEEGIKELGSQILKEHPVENTQLQNEKLYLYYLQNGRDMYVDQELDINRLSDYDVDHIVPQSFLKDDSIDNKVLTRSDKNRGKSDNVPSEEVVKKMKNYWRQLLNAKLITQRKFDNLTKAERGGLSELDKAGFIKRQLVETRQITKHVAQILDSRMNTKYDENDKLIREVKVITLKSKLVSDFRKDFQFYKVREINNYHHAHDAYLNAVVGTALIKKYPKLESEFVYGDYKVYDVRKMIAKSEQEIGKATAKYFFYSNIMNFFKTEITLANGEIRKRPLIETNGETGEIVWDKGRDFATVRKVLSMPQVNIVKKTEVQTGGFSKESILPKRNSDKLIARKKDWDPKKYGGFDSPTVAYSVLVVAKVEKGKSKKLKSVKELLGITIMERSSFEKNPIDFLEAKGYKEVKKDLIIKLPKYSLFELENGRKRMLASAGELQKGNELALPSKYVNFLYLASHYEKLKGSPEDNEQKQLFVEQHKHYLDEIIEQISEFSKRVILADANLDKVLSAYNKHRDKPIREQAENIIHLFTLTNLGAPAAFKYFDTTIDRKRYTSTKEVLDATLIHQSITGLYETRIDLSQLGGDSGGSGGSGGSTNLSDIIEKETGKQLVIQESILMLPEEVEEVIGNKPESDILVHTAYDESTDENVMLLTSDAPEYKPWALVIQDSNGENKIKMLSGGSGGSGGSTNLSDIIEKETGKQLVIQESILMLPEEVEEVIGNKPESDILVHTAYDESTDENVMLLTSDAPEYKPWALVIQDSNGENKIKMLSGGSKRTADGSEFEPKKKRKV

SEQ ID NO: 235 - protein, 1786 aa, Artificial Sequence
  Synthetic
MKRTADGSEFESPKKKRKVFERNYDPRELRKETYLLYEIKWGKSGKLWRHWCQNNRTQHAEVYFLENIFNARRFNPSTHCSITWYLSWSPCAECSQKIVDFLKEHPNVNLEIYVARLYYHEDERNRQGLRDLVNSGVTIRIMDLPDYNYCWKTFVSDQGGDEDYWPGHFAPWIKQYSLKLSGGSSGGSSGSETPGTSESATPESSGGSSGGSDKKYSIGLAIGTNSVGWAVITDEYKVPSKKFKVLGNTDRHSIKKNLIGALLFDSGETAEATRLKRTARRRYTRRKNRICYLQEIFSNEMAKVDDSFFHRLEESFLVEEDKKHERHPIFGNIVDEVAYHEKYPTIYHLRKKLVDSTDKADLRLIYLALAHMIKFRGHFLIEGDLNPDNSDVDKLFIQLVQTYNQLFEENPINASGVDAKAILSARLSKSRRLENLIAQLPGEKKNGLFGNLIALSLGLTPNFKSNFDLAEDAKLQLSKDTYDDDLDNLLAQIGDQYADLFLAAKNLSDAILLSDILRVNTEITKAPLSASMIKRYDEHHQDLTLLKALVRQQLPEKYKEIFFDQSKNGYAGYIDGGASQEEFYKFIKPILEKMDGTEELLVKLNREDLLRKQRTFDNGSIPHQIHLGELHAILRRQEDFYPFLKDNREKIEKILTFRIPYYVGPLARGNSRFAWMTRKSEETITPWNFEEVVDKGASAQSFIERMTNFDKNLPNEKVLPKHSLLYEYFTVYNELTKVKYVTEGMRKPAFLSGEQKKAIVDLLFKTNRKVTVKQLKEDYFKKIECFDSVEISGVEDRFNASLGTYHDLLKIIKDKDFLDNEENEDILEDIVLTLTLFEDREMIEERLKTYAHLFDDKVMKQLKRRRYTGWGRLSRKLINGIRDKQSGKTILDFLKSDGFANRNFMQLIHDDSLTFKEDIQKAQVSGQGDSLHEHIANLAGSPAIKKGILQTVKVVDELVKVMGRHKPENIVIEMARENQTTQKGQKNSRERMKRIEEGIKELGSQILKEHPVENTQLQNEKLYLYYLQNGRDMYVDQELDINRLSDYDVDHIVPQSFLKDDSIDNKVLTRSDKNRGKSDNVPSEEVVKKMKNYWRQLLNAKLITQRKFDNLTKAERGGLSELDKAGFIKRQLVETRQITKHVAQILDSRMNTKYDENDKLIREVKVITLKSKLVSDFRKDFQFYKVREINNYHHAHDAYLNAVVGTALIKKYPKLESEFVYGDYKVYDVRKMIAKSEQEIGKATAKYFFYSNIMNFFKTEITLANGEIRKRPLIETNGETGEIVWDKGRDFATVRKVLSMPQVNIVKKTEVQTGGFSKESILPKRNSDKLIARKKDWDPKKYGGFDSPTVAYSVLVVAKVEKGKSKKLKSVKELLGITIMERSSFEKNPIDFLEAKGYKEVKKDLIIKLPKYSLFELENGRKRMLASAGELQKGNELALPSKYVNFLYLASHYEKLKGSPEDNEQKQLFVEQHKHYLDEIIEQISEFSKRVILADANLDKVLSAYNKHRDKPIREQAENIIHLFTLTNLGAPAAFKYFDTTIDRKRYTSTKEVLDATLIHQSITGLYETRIDLSQLGGDSGGSGGSGGSTNLSDIIEKETGKQLVIQESILMLPEEVEEVIGNKPESDILVHTAYDESTDENVMLLTSDAPEYKPWALVIQDSNGENKIKMLSGGSGGSGGSTNLSDIIEKETGKQLVIQESILMLPEEVEEVIGNKPESDILVHTAYDESTDENVMLLTSDAPEYKPWALVIQDSNGENKIKMLSGGSKRTADGSEFEPKKKRKV

SEQ ID NO: 236 - protein, 1823 aa, Artificial Sequence
  Synthetic
MKRTADGSEFESPKKKRKVEASPASGPRHLMDPHIFTSNFNNGIGRHKTYLCYEVERLDNGTSVKMDQHRGFLHGQAKNLLCGFYGRHAELRFLDLVPSLQLDPAQIYRVTWFISWSPCFSWGCAGEVRAFLQENTHVRLRIFAARIYDYDPLYKEALQMLRDAGAQVSIMTYDEFKHCWDTFVDHQGCPFQPWDGLDEHSQALSGRLRAILQNQGNSGGSSGGSSGSETPGTSESATPESSGGSSGGSDKKYSIGLAIGTNSVGWAVITDEYKVPSKKFKVLGNTDRHSIKKNLIGALLFDSGETAEATRLKRTARRRYTRRKNRICYLQEIFSNEMAKVDDSFFHRLEESFLVEEDKKHERHPIFGNIVDEVAYHEKYPTIYHLRKKLVDSTDKADLRLIYLALAHMIKFRGHFLIEGDLNPDNSDVDKLFIQLVQTYNQLFEENPINASGVDAKAILSARLSKSRRLENLIAQLPGEKKNGLFGNLIALSLGLTPNFKSNFDLAEDAKLQLSKDTYDDDLDNLLAQIGDQYADLFLAAKNLSDAILLSDILRVNTEITKAPLSASMIKRYDEHHQDLTLLKALVRQQLPEKYKEIFFDQSKNGYAGYIDGGASQEEFYKFIKPILEKMDGTEELLVKLNREDLLRKQRTFDNGSIPHQIHLGELHAILRRQEDFYPFLKDNREKIEKILTFRIPYYVGPLARGNSRFAWMTRKSEETITPWNFEEVVDKGASAQSFIERMTNFDKNLPNEKVLPKHSLLYEYFTVYNELTKVKYVTEGMRKPAFLSGEQKKAIVDLLFKTNRKVTVKQLKEDYFKKIECFDSVEISGVEDRFNASLGTYHDLLKIIKDKDFLDNEENEDILEDIVLTLTLFEDREMIEERLKTYAHLFDDKVMKQLKRRRYTGWGRLSRKLINGIRDKQSGKTILDFLKSDGFANRNFMQLIHDDSLTFKEDIQKAQVSGQGDSLHEHIANLAGSPAIKKGILQTVKVVDELVKVMGRHKPENIVIEMARENQTTQKGQKNSRERMKRIEEGIKELGSQILKEHPVENTQLQNEKLYLYYLQNGRDMYVDQELDINRLSDYDVDHIVPQSFLKDDSIDNKVLTRSDKNRGKSDNVPSEEVVKKMKNYWRQLLNAKLITQRKFDNLTKAERGGLSELDKAGFIKRQLVETRQITKHVAQILDSRMNTKYDENDKLIREVKVITLKSKLVSDFRKDFQFYKVREINNYHHAHDAYLNAVVGTALIKKYPKLESEFVYGDYKVYDVRKMIAKSEQEIGKATAKYFFYSNIMNFFKTEITLANGEIRKRPLIETNGETGEIVWDKGRDFATVRKVLSMPQVNIVKKTEVQTGGFSKESILPKRNSDKLIARKKDWDPKKYGGFDSPTVAYSVLVVAKVEKGKSKKLKSVKELLGITIMERSSFEKNPIDFLEAKGYKEVKKDLIIKLPKYSLFELENGRKRMLASAGELQKGNELALPSKYVNFLYLASHYEKLKGSPEDNEQKQLFVEQHKHYLDEIIEQISEFSKRVILADANLDKVLSAYNKHRDKPIREQAENIIHLFTLTNLGAPAAFKYFDTTIDRKRYTSTKEVLDATLIHQSITGLYETRIDLSQLGGDSGGSGGSGGSTNLSDIIEKETGKQLVIQESILMLPEEVEEVIGNKPESDILVHTAYDESTDENVMLLTSDAPEYKPWALVIQDSNGENKIKMLSGGSGGSGGSTNLSDIIEKETGKQLVIQESILMLPEEVEEVIGNKPESDILVHTAYDESTDENVMLLTSDAPEYKPWALVIQDSNGENKIKMLSGGSKRTADGSEFEPKKKRKV

SEQ ID NO: 237 - protein, 1853 aa, Artificial Sequence
  Synthetic
MKRTADGSEFESPKKKRKVSSETGPVAVDPTLRRRIEPHEFEVFFDPRELAAETCLLYEINWGGRHSIWRHTSQNTNKHVEVNFIEKFTTERYFCPNTRCSITWFLSWSPCGECSRAITEFLSRYPHVTLFIYIARLYHLANPRNRQGLRDLISSGVTIQIMTEQESGYCWRNFVNYSPSNEAHWPRYPHLWVRLYVLELYCIILGLPPCLNILRRKQPQLTFFTIALQSCHYQRLPPHILWATGLKSGGSSGGSSGSETPGTSESATPESSGGSSGGSDKKYSIGLAIGTNSVGWAVITDEYKVPSKKFKVLGNTDRHSIKKNLIGALLFDSGETAEATRLKRTARRRYTRRKNRICYLQEIFSNEMAKVDDSFFHRLEESFLVEEDKKHERHPIFGNIVDEVAYHEKYPTIYHLRKKLVDSTDKADLRLIYLALAHMIKFRGHFLIEGDLNPDNSDVDKLFIQLVQTYNQLFEENPINASGVDAKAILSARLSKSRRLENLIAQLPGEKKNGLFGNLIALSLGLTPNFKSNFDLAEDAKLQLSKDTYDDDLDNLLAQIGDQYADLFLAAKNLSDAILLSDILRVNTEITKAPLSASMIKRYDEHHQDLTLLKALVRQQLPEKYKEIFFDQSKNGYAGYIDGGASQEEFYKFIKPILEKMDGTEELLVKLNREDLLRKQRTFDNGSIPHQIHLGELHAILRRQEDFYPFLKDNREKIEKILTFRIPYYVGPLARGNSRFAWMTRKSEETITPWNFEEVVDKGASAQSFIERMTNFDKNLPNEKVLPKHSLLYEYFTVYNELTKVKYVTEGMRKPAFLSGEQKKAIVDLLFKTNRKVTVKQLKEDYFKKIECFDSVEISGVEDRFNASLGTYHDLLKIIKDKDFLDNEENEDILEDIVLTLTLFEDREMIEERLKTYAHLFDDKVMKQLKRRRYTGWGRLSRKLINGIRDKQSGKTILDFLKSDGFANRNFMQLIHDDSLTFKEDIQKAQVSGQGDSLHEHIANLAGSPAIKKGILQTVKVVDELVKVMGRHKPENIVIEMARENQTTQKGQKNSRERMKRIEEGIKELGSQILKEHPVENTQLQNEKLYLYYLQNGRDMYVDQELDINRLSDYDVDHIVPQSFLKDDSIDNKVLTRSDKNRGKSDNVPSEEVVKKMKNYWRQLLNAKLITQRKFDNLTKAERGGLSELDKAGFIKRQLVETRQITKHVAQILDSRMNTKYDENDKLIREVKVITLKSKLVSDFRKDFQFYKVREINNYHHAHDAYLNAVVGTALIKKYPKLESEFVYGDYKVYDVRKMIAKSEQEIGKATAKYFFYSNIMNFFKTEITLANGEIRKRPLIETNGETGEIVWDKGRDFATVRKVLSMPQVNIVKKTEVQTGGFSKESILPKRNSDKLIARKKDWDPKKYGGFDSPTVAYSVLVVAKVEKGKSKKLKSVKELLGITIMERSSFEKNPIDFLEAKGYKEVKKDLIIKLPKYSLFELENGRKRMLASAGELQKGNELALPSKYVNFLYLASHYEKLKGSPEDNEQKQLFVEQHKHYLDEIIEQISEFSKRVILADANLDKVLSAYNKHRDKPIREQAENIIHLFTLTNLGAPAAFKYFDTTIDRKRYTSTKEVLDATLIHQSITGLYETRIDLSQLGGDSGGSGGSGGSTNLSDIIEKETGKQLVIQESILMLPEEVEEVIGNKPESDILVHTAYDESTDENVMLLTSDAPEYKPWALVIQDSNGENKIKMLSGGSGGSGGSTNLSDIIEKETGKQLVIQESILMLPEEVEEVIGNKPESDILVHTAYDESTDENVMLLTSDAPEYKPWALVIQDSNGENKIKMLSGGSKRTADGSEFEPKKKRKV

SEQ ID NO: 238 - protein, 1853 aa, Artificial Sequence
  Synthetic
MKRTADGSEFESPKKKRKVSSETGPVAVDPTLRRRIEPHEFEVFFDPRELRKETCLLYEINWGGRHSIWRHTSQNTNKHVEVNFIEKFTTERYFCPNTRCSITWFLSWSPCGECSRAITEFLSRYPHVTLFIYIARLYHHADPRNRQGLRDLISSGVTIQIMTEQESGYCWRNFVNYSPSNEAHWPRYPHLWVRLYVLELYCIILGLPPCLNILRRKQPQLTFFTIALQSCHYQRLPPHILWATGLKSGGSSGGSSGSETPGTSESATPESSGGSSGGSDKKYSIGLAIGTNSVGWAVITDEYKVPSKKFKVLGNTDRHSIKKNLIGALLFDSGETAEATRLKRTARRRYTRRKNRICYLQEIFSNEMAKVDDSFFHRLEESFLVEEDKKHERHPIFGNIVDEVAYHEKYPTIYHLRKKLVDSTDKADLRLIYLALAHMIKFRGHFLIEGDLNPDNSDVDKLFIQLVQTYNQLFEENPINASGVDAKAILSARLSKSRRLENLIAQLPGEKKNGLFGNLIALSLGLTPNFKSNFDLAEDAKLQLSKDTYDDDLDNLLAQIGDQYADLFLAAKNLSDAILLSDILRVNTEITKAPLSASMIKRYDEHHQDLTLLKALVRQQLPEKYKEIFFDQSKNGYAGYIDGGASQEEFYKFIKPILEKMDGTEELLVKLNREDLLRKQRTFDNGSIPHQIHLGELHAILRRQEDFYPFLKDNREKIEKILTFRIPYYVGPLARGNSRFAWMTRKSEETITPWNFEEVVDKGASAQSFIERMTNFDKNLPNEKVLPKHSLLYEYFTVYNELTKVKYVTEGMRKPAFLSGEQKKAIVDLLFKTNRKVTVKQLKEDYFKKIECFDSVEISGVEDRFNASLGTYHDLLKIIKDKDFLDNEENEDILEDIVLTLTLFEDREMIEERLKTYAHLFDDKVMKQLKRRRYTGWGRLSRKLINGIRDKQSGKTILDFLKSDGFANRNFMQLIHDDSLTFKEDIQKAQVSGQGDSLHEHIANLAGSPAIKKGILQTVKVVDELVKVMGRHKPENIVIEMARENQTTQKGQKNSRERMKRIEEGIKELGSQILKEHPVENTQLQNEKLYLYYLQNGRDMYVDQELDINRLSDYDVDHIVPQSFLKDDSIDNKVLTRSDKNRGKSDNVPSEEVVKKMKNYWRQLLNAKLITQRKFDNLTKAERGGLSELDKAGFIKRQLVETRQITKHVAQILDSRMNTKYDENDKLIREVKVITLKSKLVSDFRKDFQFYKVREINNYHHAHDAYLNAVVGTALIKKYPKLESEFVYGDYKVYDVRKMIAKSEQEIGKATAKYFFYSNIMNFFKTEITLANGEIRKRPLIETNGETGEIVWDKGRDFATVRKVLSMPQVNIVKKTEVQTGGFSKESIRPKRNSDKLIARKKDWDPKKYGGFVSPTVAYSVLVVAKVEKGKSKKLKSVKELLGITIMERSSFEKNPIDFLEAKGYKEVKKDLIIKLPKYSLFELENGRKRMLASARFLQKGNELALPSKYVNFLYLASHYEKLKGSPEDNEQKQLFVEQHKHYLDEIIEQISEFSKRVILADANLDKVLSAYNKHRDKPIREQAENIIHLFTLTNLGAPRAFKYFDTTIDRKVYRSTKEVLDATLIHQSITGLYETRIDLSQLGGDSGGSGGSGGSTNLSDIIEKETGKQLVIQESILMLPEEVEEVIGNKPESDILVHTAYDESTDENVMLLTSDAPEYKPWALVIQDSNGENKIKMLSGGSGGSGGSTNLSDIIEKETGKQLVIQESILMLPEEVEEVIGNKPESDILVHTAYDESTDENVMLLTSDAPEYKPWALVIQDSNGENKIKMLSGGSKRTADGSEFEPKKKRKV

SEQ ID NO: 239 - protein, 1853 aa, Artificial Sequence
  Synthetic
MKRTADGSEFESPKKKRKVSSETGPVAVDPTLRRRIEPHEFEVFFDPRELRKETCLLYEINWGGRHSIWRHTSQNTNKHVEVNFIEKFTTERYFCPNTRCSITWFLSYSPCGECSRAITEFLSRYPHVTLFIYIARLYHHADPENRQGLRDLISSGVTIQIMTEQESGYCWRNFVNYSPSNEAHWPRYPHLWVRLYVLELYCIILGLPPCLNILRRKQPQLTFFTIALQSCHYQRLPPHILWATGLKSGGSSGGSSGSETPGTSESATPESSGGSSGGSDKKYSIGLAIGTNSVGWAVITDEYKVPSKKFKVLGNTDRHSIKKNLIGALLFDSGETAEATRLKRTARRRYTRRKNRICYLQEIFSNEMAKVDDSFFHRLEESFLVEEDKKHERHPIFGNIVDEVAYHEKYPTIYHLRKKLVDSTDKADLRLIYLALAHMIKFRGHFLIEGDLNPDNSDVDKLFIQLVQTYNQLFEENPINASGVDAKAILSARLSKSRRLENLIAQLPGEKKNGLFGNLIALSLGLTPNFKSNFDLAEDAKLQLSKDTYDDDLDNLLAQIGDQYADLFLAAKNLSDAILLSDILRVNTEITKAPLSASMIKRYDEHHQDLTLLKALVRQQLPEKYKEIFFDQSKNGYAGYIDGGASQEEFYKFIKPILEKMDGTEELLVKLNREDLLRKQRTFDNGSIPHQIHLGELHAILRRQEDFYPFLKDNREKIEKILTFRIPYYVGPLARGNSRFAWMTRKSEETITPWNFEEVVDKGASAQSFIERMTNFDKNLPNEKVLPKHSLLYEYFTVYNELTKVKYVTEGMRKPAFLSGEQKKAIVDLLFKTNRKVTVKQLKEDYFKKIECFDSVEISGVEDRFNASLGTYHDLLKIIKDKDFLDNEENEDILEDIVLTLTLFEDREMIEERLKTYAHLFDDKVMKQLKRRRYTGWGRLSRKLINGIRDKQSGKTILDFLKSDGFANRNFMQLIHDDSLTFKEDIQKAQVSGQGDSLHEHIANLAGSPAIKKGILQTVKVVDELVKVMGRHKPENIVIEMARENQTTQKGQKNSRERMKRIEEGIKELGSQILKEHPVENTQLQNEKLYLYYLQNGRDMYVDQELDINRLSDYDVDHIVPQSFLKDDSIDNKVLTRSDKNRGKSDNVPSEEVVKKMKNYWRQLLNAKLITQRKFDNLTKAERGGLSELDKAGFIKRQLVETRQITKHVAQILDSRMNTKYDENDKLIREVKVITLKSKLVSDFRKDFQFYKVREINNYHHAHDAYLNAVVGTALIKKYPKLESEFVYGDYKVYDVRKMIAKSEQEIGKATAKYFFYSNIMNFFKTEITLANGEIRKRPLIETNGETGEIVWDKGRDFATVRKVLSMPQVNIVKKTEVQTGGFSKESIRPKRNSDKLIARKKDWDPKKYGGFVSPTVAYSVLVVAKVEKGKSKKLKSVKELLGITIMERSSFEKNPIDFLEAKGYKEVKKDLIIKLPKYSLFELENGRKRMLASARFLQKGNELALPSKYVNFLYLASHYEKLKGSPEDNEQKQLFVEQHKHYLDEIIEQISEFSKRVILADANLDKVLSAYNKHRDKPIREQAENIIHLFTLTNLGAPRAFKYFDTTIDRKVYRSTKEVLDATLIHQSITGLYETRIDLSQLGGDSGGSGGSGGSTNLSDIIEKETGKQLVIQESILMLPEEVEEVIGNKPESDILVHTAYDESTDENVMLLTSDAPEYKPWALVIQDSNGENKIKMLSGGSGGSGGSTNLSDIIEKETGKQLVIQESILMLPEEVEEVIGNKPESDILVHTAYDESTDENVMLLTSDAPEYKPWALVIQDSNGENKIKMLSGGSKRTADGSEFEPKKKRKV

SEQ ID NO: 240 - protein, 1853 aa, Artificial Sequence
  Synthetic
MKRTADGSEFESPKKKRKVSSETGPVAVDPTLRRRIEPHEFEVFFDPRELRKETCLLYEINWGGRHSIWRHTSQNTNKHVEVNFIEKFTTERYFCPNTRCSITWFLSYSPCGECSRAITEFLSRYPHVTLFIYIARLYHHADPRNRQGLEDLISSGVTIQIMTEQESGYCWRNFVNYSPSNEAHWPRYPHLWVRLYVLELYCIILGLPPCLNILRRKQPQLTFFTIALQSCHYQRLPPHILWATGLKSGGSSGGSSGSETPGTSESATPESSGGSSGGSDKKYSIGLAIGTNSVGWAVITDEYKVPSKKFKVLGNTDRHSIKKNLIGALLFDSGETAEATRLKRTARRRYTRRKNRICYLQEIFSNEMAKVDDSFFHRLEESFLVEEDKKHERHPIFGNIVDEVAYHEKYPTIYHLRKKLVDSTDKADLRLIYLALAHMIKFRGHFLIEGDLNPDNSDVDKLFIQLVQTYNQLFEENPINASGVDAKAILSARLSKSRRLENLIAQLPGEKKNGLFGNLIALSLGLTPNFKSNFDLAEDAKLQLSKDTYDDDLDNLLAQIGDQYADLFLAAKNLSDAILLSDILRVNTEITKAPLSASMIKRYDEHHQDLTLLKALVRQQLPEKYKEIFFDQSKNGYAGYIDGGASQEEFYKFIKPILEKMDGTEELLVKLNREDLLRKQRTFDNGSIPHQIHLGELHAILRRQEDFYPFLKDNREKIEKILTFRIPYYVGPLARGNSRFAWMTRKSEETITPWNFEEVVDKGASAQSFIERMTNFDKNLPNEKVLPKHSLLYEYFTVYNELTKVKYVTEGMRKPAFLSGEQKKAIVDLLFKTNRKVTVKQLKEDYFKKIECFDSVEISGVEDRFNASLGTYHDLLKIIKDKDFLDNEENEDILEDIVLTLTLFEDREMIEERLKTYAHLFDDKVMKQLKRRRYTGWGRLSRKLINGIRDKQSGKTILDFLKSDGFANRNFMQLIHDDSLTFKEDIQKAQVSGQGDSLHEHIANLAGSPAIKKGILQTVKVVDELVKVMGRHKPENIVIEMARENQTTQKGQKNSRERMKRIEEGIKELGSQILKEHPVENTQLQNEKLYLYYLQNGRDMYVDQELDINRLSDYDVDHIVPQSFLKDDSIDNKVLTRSDKNRGKSDNVPSEEVVKKMKNYWRQLLNAKLITQRKFDNLTKAERGGLSELDKAGFIKRQLVETRQITKHVAQILDSRMNTKYDENDKLIREVKVITLKSKLVSDFRKDFQFYKVREINNYHHAHDAYLNAVVGTALIKKYPKLESEFVYGDYKVYDVRKMIAKSEQEIGKATAKYFFYSNIMNFFKTEITLANGEIRKRPLIETNGETGEIVWDKGRDFATVRKVLSMPQVNIVKKTEVQTGGFSKESIRPKRNSDKLIARKKDWDPKKYGGFVSPTVAYSVLVVAKVEKGKSKKLKSVKELLGITIMERSSFEKNPIDFLEAKGYKEVKKDLIIKLPKYSLFELENGRKRMLASARFLQKGNELALPSKYVNFLYLASHYEKLKGSPEDNEQKQLFVEQHKHYLDEIIEQISEFSKRVILADANLDKVLSAYNKHRDKPIREQAENIIHLFTLTNLGAPRAFKYFDTTIDRKVYRSTKEVLDATLIHQSITGLYETRIDLSQLGGDSGGSGGSGGSTNLSDIIEKETGKQLVIQESILMLPEEVEEVIGNKPESDILVHTAYDESTDENVMLLTSDAPEYKPWALVIQDSNGENKIKMLSGGSGGSGGSTNLSDIIEKETGKQLVIQESILMLPEEVEEVIGNKPESDILVHTAYDESTDENVMLLTSDAPEYKPWALVIQDSNGENKIKMLSGGSKRTADGSEFEPKKKRKV

SEQ ID NO: 241 - protein, 1853 aa, Artificial Sequence
  Synthetic
MKRTADGSEFESPKKKRKVSSETGPVAVDPTLRRRIEPHEFEVFFDPRELRKETCLLYEINWGGRHSIWRHTSQNTNKHVEVNFIEKFTTERYFCPNTRCSITWFLSYSPCGECSRAITEFLSRYPHVTLFIYIARLYHHADPENRQGLEDLISSGVTIQIMTEQESGYCWRNFVNYSPSNEAHWPRYPHLWVRLYVLELYCIILGLPPCLNILRRKQPQLTFFTIALQSCHYQRLPPHILWATGLKSGGSSGGSSGSETPGTSESATPESSGGSSGGSDKKYSIGLAIGTNSVGWAVITDEYKVPSKKFKVLGNTDRHSIKKNLIGALLFDSGETAEATRLKRTARRRYTRRKNRICYLQEIFSNEMAKVDDSFFHRLEESFLVEEDKKHERHPIFGNIVDEVAYHEKYPTIYHLRKKLVDSTDKADLRLIYLALAHMIKFRGHFLIEGDLNPDNSDVDKLFIQLVQTYNQLFEENPINASGVDAKAILSARLSKSRRLENLIAQLPGEKKNGLFGNLIALSLGLTPNFKSNFDLAEDAKLQLSKDTYDDDLDNLLAQIGDQYADLFLAAKNLSDAILLSDILRVNTEITKAPLSASMIKRYDEHHQDLTLLKALVRQQLPEKYKEIFFDQSKNGYAGYIDGGASQEEFYKFIKPILEKMDGTEELLVKLNREDLLRKQRTFDNGSIPHQIHLGELHAILRRQEDFYPFLKDNREKIEKILTFRIPYYVGPLARGNSRFAWMTRKSEETITPWNFEEVVDKGASAQSFIERMTNFDKNLPNEKVLPKHSLLYEYFTVYNELTKVKYVTEGMRKPAFLSGEQKKAIVDLLFKTNRKVTVKQLKEDYFKKIECFDSVEISGVEDRFNASLGTYHDLLKIIKDKDFLDNEENEDILEDIVLTLTLFEDREMIEERLKTYAHLFDDKVMKQLKRRRYTGWGRLSRKLINGIRDKQSGKTILDFLKSDGFANRNFMQLIHDDSLTFKEDIQKAQVSGQGDSLHEHIANLAGSPAIKKGILQTVKVVDELVKVMGRHKPENIVIEMARENQTTQKGQKNSRERMKRIEEGIKELGSQILKEHPVENTQLQNEKLYLYYLQNGRDMYVDQELDINRLSDYDVDHIVPQSFLKDDSIDNKVLTRSDKNRGKSDNVPSEEVVKKMKNYWRQLLNAKLITQRKFDNLTKAERGGLSELDKAGFIKRQLVETRQITKHVAQILDSRMNTKYDENDKLIREVKVITLKSKLVSDFRKDFQFYKVREINNYHHAHDAYLNAVVGTALIKKYPKLESEFVYGDYKVYDVRKMIAKSEQEIGKATAKYFFYSNIMNFFKTEITLANGEIRKRPLIETNGETGEIVWDKGRDFATVRKVLSMPQVNIVKKTEVQTGGFSKESIRPKRNSDKLIARKKDWDPKKYGGFVSPTVAYSVLVVAKVEKGKSKKLKSVKELLGITIMERSSFEKNPIDFLEAKGYKEVKKDLIIKLPKYSLFELENGRKRMLASARFLQKGNELALPSKYVNFLYLASHYEKLKGSPEDNEQKQLFVEQHKHYLDEIIEQISEFSKRVILADANLDKVLSAYNKHRDKPIREQAENIIHLFTLTNLGAPRAFKYFDTTIDRKVYRSTKEVLDATLIHQSITGLYETRIDLSQLGGDSGGSGGSGGSTNLSDIIEKETGKQLVIQESILMLPEEVEEVIGNKPESDILVHTAYDESTDENVMLLTSDAPEYKPWALVIQDSNGENKIKMLSGGSGGSGGSTNLSDIIEKETGKQLVIQESILMLPEEVEEVIGNKPESDILVHTAYDESTDENVMLLTSDAPEYKPWALVIQDSNGENKIKMLSGGSKRTADGSEFEPKKKRKV

SEQ ID NO: 242 - protein, 1853 aa, Artificial Sequence
  Synthetic
MKRTADGSEFESPKKKRKVSSETGPVAVDPTLRRRIEPHEFEVFFDPRELRKETCLLYEINWGGRHSIWRHTSQNTNKHVEVNFIEKFTTERYFCPNTRCSITWFLSWSPCGECSRAITEFLSRYPHVTLFIYIARLYHHADPENRQGLEDLISSGVTIQIMTEQESGYCWRNFVNYSPSNEAHWPRYPHLWVRLYVLELYCIILGLPPCLNILRRKQPQLTFFTIALQSCHYQRLPPHILWATGLKSGGSSGGSSGSETPGTSESATPESSGGSSGGSDKKYSIGLAIGTNSVGWAVITDEYKVPSKKFKVLGNTDRHSIKKNLIGALLFDSGETAEATRLKRTARRRYTRRKNRICYLQEIFSNEMAKVDDSFFHRLEESFLVEEDKKHERHPIFGNIVDEVAYHEKYPTIYHLRKKLVDSTDKADLRLIYLALAHMIKFRGHFLIEGDLNPDNSDVDKLFIQLVQTYNQLFEENPINASGVDAKAILSARLSKSRRLENLIAQLPGEKKNGLFGNLIALSLGLTPNFKSNFDLAEDAKLQLSKDTYDDDLDNLLAQIGDQYADLFLAAKNLSDAILLSDILRVNTEITKAPLSASMIKRYDEHHQDLTLLKALVRQQLPEKYKEIFFDQSKNGYAGYIDGGASQEEFYKFIKPILEKMDGTEELLVKLNREDLLRKQRTFDNGSIPHQIHLGELHAILRRQEDFYPFLKDNREKIEKILTFRIPYYVGPLARGNSRFAWMTRKSEETITPWNFEEVVDKGASAQSFIERMTNFDKNLPNEKVLPKHSLLYEYFTVYNELTKVKYVTEGMRKPAFLSGEQKKAIVDLLFKTNRKVTVKQLKEDYFKKIECFDSVEISGVEDRFNASLGTYHDLLKIIKDKDFLDNEENEDILEDIVLTLTLFEDREMIEERLKTYAHLFDDKVMKQLKRRRYTGWGRLSRKLINGIRDKQSGKTILDFLKSDGFANRNFMQLIHDDSLTFKEDIQKAQVSGQGDSLHEHIANLAGSPAIKKGILQTVKVVDELVKVMGRHKPENIVIEMARENQTTQKGQKNSRERMKRIEEGIKELGSQILKEHPVENTQLQNEKLYLYYLQNGRDMYVDQELDINRLSDYDVDHIVPQSFLKDDSIDNKVLTRSDKNRGKSDNVPSEEVVKKMKNYWRQLLNAKLITQRKFDNLTKAERGGLSELDKAGFIKRQLVETRQITKHVAQILDSRMNTKYDENDKLIREVKVITLKSKLVSDFRKDFQFYKVREINNYHHAHDAYLNAVVGTALIKKYPKLESEFVYGDYKVYDVRKMIAKSEQEIGKATAKYFFYSNIMNFFKTEITLANGEIRKRPLIETNGETGEIVWDKGRDFATVRKVLSMPQVNIVKKTEVQTGGFSKESIRPKRNSDKLIARKKDWDPKKYGGFVSPTVAYSVLVVAKVEKGKSKKLKSVKELLGITIMERSSFEKNPIDFLEAKGYKEVKKDLIIKLPKYSLFELENGRKRMLASARFLQKGNELALPSKYVNFLYLASHYEKLKGSPEDNEQKQLFVEQHKHYLDEIIEQISEFSKRVILADANLDKVLSAYNKHRDKPIREQAENIIHLFTLTNLGAPRAFKYFDTTIDRKVYRSTKEVLDATLIHQSITGLYETRIDLSQLGGDSGGSGGSGGSTNLSDIIEKETGKQLVIQESILMLPEEVEEVIGNKPESDILVHTAYDESTDENVMLLTSDAPEYKPWALVIQDSNGENKIKMLSGGSGGSGGSTNLSDIIEKETGKQLVIQESILMLPEEVEEVIGNKPESDILVHTAYDESTDENVMLLTSDAPEYKPWALVIQDSNGENKIKMLSGGSKRTADGSEFEPKKKRKV

SEQ ID NO: 243 - protein, 1853 aa, Artificial Sequence
  Synthetic
MKRTADGSEFESPKKKRKVSSETGPVAVDPTLRRRIEPHEFEVFFDPRELAAETCLLYEINWGGRHSIWRHTSQNTNKHVEVNFIEKFTTERYFCPNTRCSITWFLSWSPCGECSRAITEFLSRYPHVTLFIYIARLYHHADPRNRQGLRDLISSGVTIQIMTEQESGYCWRNFVNYSPSNEAHWPRYPHLWVRLYVLELYCIILGLPPCLNILRRKQPQLTFFTIALQSCHYQRLPPHILWATGLKSGGSSGGSSGSETPGTSESATPESSGGSSGGSDKKYSIGLAIGTNSVGWAVITDEYKVPSKKFKVLGNTDRHSIKKNLIGALLFDSGETAEATRLKRTARRRYTRRKNRICYLQEIFSNEMAKVDDSFFHRLEESFLVEEDKKHERHPIFGNIVDEVAYHEKYPTIYHLRKKLVDSTDKADLRLIYLALAHMIKFRGHFLIEGDLNPDNSDVDKLFIQLVQTYNQLFEENPINASGVDAKAILSARLSKSRRLENLIAQLPGEKKNGLFGNLIALSLGLTPNFKSNFDLAEDAKLQLSKDTYDDDLDNLLAQIGDQYADLFLAAKNLSDAILLSDILRVNTEITKAPLSASMIKRYDEHHQDLTLLKALVRQQLPEKYKEIFFDQSKNGYAGYIDGGASQEEFYKFIKPILEKMDGTEELLVKLNREDLLRKQRTFDNGSIPHQIHLGELHAILRRQEDFYPFLKDNREKIEKILTFRIPYYVGPLARGNSRFAWMTRKSEETITPWNFEEVVDKGASAQSFIERMTNFDKNLPNEKVLPKHSLLYEYFTVYNELTKVKYVTEGMRKPAFLSGEQKKAIVDLLFKTNRKVTVKQLKEDYFKKIECFDSVEISGVEDRFNASLGTYHDLLKIIKDKDFLDNEENEDILEDIVLTLTLFEDREMIEERLKTYAHLFDDKVMKQLKRRRYTGWGRLSRKLINGIRDKQSGKTILDFLKSDGFANRNFMQLIHDDSLTFKEDIQKAQVSGQGDSLHEHIANLAGSPAIKKGILQTVKVVDELVKVMGRHKPENIVIEMARENQTTQKGQKNSRERMKRIEEGIKELGSQILKEHPVENTQLQNEKLYLYYLQNGRDMYVDQELDINRLSDYDVDHIVPQSFLKDDSIDNKVLTRSDKNRGKSDNVPSEEVVKKMKNYWRQLLNAKLITQRKFDNLTKAERGGLSELDKAGFIKRQLVETRQITKHVAQILDSRMNTKYDENDKLIREVKVITLKSKLVSDFRKDFQFYKVREINNYHHAHDAYLNAVVGTALIKKYPKLESEFVYGDYKVYDVRKMIAKSEQEIGKATAKYFFYSNIMNFFKTEITLANGEIRKRPLIETNGETGEIVWDKGRDFATVRKVLSMPQVNIVKKTEVQTGGFSKESIRPKRNSDKLIARKKDWDPKKYGGFVSPTVAYSVLVVAKVEKGKSKKLKSVKELLGITIMERSSFEKNPIDFLEAKGYKEVKKDLIIKLPKYSLFELENGRKRMLASARFLQKGNELALPSKYVNFLYLASHYEKLKGSPEDNEQKQLFVEQHKHYLDEIIEQISEFSKRVILADANLDKVLSAYNKHRDKPIREQAENIIHLFTLTNLGAPRAFKYFDTTIDRKVYRSTKEVLDATLIHQSITGLYETRIDLSQLGGDSGGSGGSGGSTNLSDIIEKETGKQLVIQESILMLPEEVEEVIGNKPESDILVHTAYDESTDENVMLLTSDAPEYKPWALVIQDSNGENKIKMLSGGSGGSGGSTNLSDIIEKETGKQLVIQESILMLPEEVEEVIGNKPESDILVHTAYDESTDENVMLLTSDAPEYKPWALVIQDSNGENKIKMLSGGSKRTADGSEFEPKKKRKV

SEQ ID NO: 244 - protein, 1874 aa, Artificial Sequence
  Synthetic
MKRTADGSEFESPKKKRKVSSETGPVAVDPTLRRRIEPHEFEVFFDPRELRKETCLLYEINWGGRHSIWRHTSQNTNKHVEVNFIEKFTTERYFCPNTRCSITWFLSYSPCGECSRAITEFLSRYPHVTLFIYIARLYHHADPENRQGLRDLISSGVTIQIMTEQESGYCWRNFVNYSPSNEAHWPRYPHLWVRLYVLELYCIILGLPPCLNILRRKQPQLTFFTIALQSCHYQRLPPHILWATGLKSGGSSGGSSGSETPGTSESATPESSGGSSGGSEIGKATAKYFFYSNIMNFFKTEITLANGEIRKRPLIETNGETGEIVWDKGRDFATVRKVLSMPQVNIVKKTEVQTGGFSKESILPKRNSDKLIARKKDWDPKKYGGFDSPTVAYSVLVVAKVEKGKSKKLKSVKELLGITIMERSSFEKNPIDFLEAKGYKEVKKDLIIKLPKYSLFELENGRKRMLASAGELQKGNELALPSKYVNFLYLASHYEKLKGSPEDNEQKQLFVEQHKHYLDEIIEQISEFSKRVILADANLDKVLSAYNKHRDKPIREQAENIIHLFTLTNLGAPAAFKYFDTTIDRKRYTSTKEVLDATLIHQSITGLYETRIDLSQLGGDGGSGGSGGSGGSGGSGGSGGMDKKYSIGLAIGTNSVGWAVITDEYKVPSKKFKVLGNTDRHSIKKNLIGALLFDSGETAEATRLKRTARRRYTRRKNRICYLQEIFSNEMAKVDDSFFHRLEESFLVEEDKKHERHPIFGNIVDEVAYHEKYPTIYHLRKKLVDSTDKADLRLIYLALAHMIKFRGHFLIEGDLNPDNSDVDKLFIQLVQTYNQLFEENPINASGVDAKAILSARLSKSRRLENLIAQLPGEKKNGLFGNLIALSLGLTPNFKSNFDLAEDAKLQLSKDTYDDDLDNLLAQIGDQYADLFLAAKNLSDAILLSDILRVNTEITKAPLSASMIKRYDEHHQDLTLLKALVRQQLPEKYKEIFFDQSKNGYAGYIDGGASQEEFYKFIKPILEKMDGTEELLVKLNREDLLRKQRTFDNGSIPHQIHLGELHAILRRQEDFYPFLKDNREKIEKILTFRIPYYVGPLARGNSRFAWMTRKSEETITPWNFEEVVDKGASAQSFIERMTNFDKNLPNEKVLPKHSLLYEYFTVYNELTKVKYVTEGMRKPAFLSGEQKKAIVDLLFKTNRKVTVKQLKEDYFKKIECFDSVEISGVEDRFNASLGTYHDLLKIIKDKDFLDNEENEDILEDIVLTLTLFEDREMIEERLKTYAHLFDDKVMKQLKRRRYTGWGRLSRKLINGIRDKQSGKTILDFLKSDGFANRNFMQLIHDDSLTFKEDIQKAQVSGQGDSLHEHIANLAGSPAIKKGILQTVKVVDELVKVMGRHKPENIVIEMARENQTTQKGQKNSRERMKRIEEGIKELGSQILKEHPVENTQLQNEKLYLYYLQNGRDMYVDQELDINRLSDYDVDHIVPQSFLKDDSIDNKVLTRSDKNRGKSDNVPSEEVVKKMKNYWRQLLNAKLITQRKFDNLTKAERGGLSELDKAGFIKRQLVETRQITKHVAQILDSRMNTKYDENDKLIREVKVITLKSKLVSDFRKDFQFYKVREINNYHHAHDAYLNAVVGTALIKKYPKLESEFVYGDYKVYDVRKMIAKSEQSGGSGGSGGSTNLSDIIEKETGKQLVIQESILMLPEEVEEVIGNKPESDILVHTAYDESTDENVMLLTSDAPEYKPWALVIQDSNGENKIKMLSGGSGGSGGSTNLSDIIEKETGKQLVIQESILMLPEEVEEVIGNKPESDILVHTAYDESTDENVMLLTSDAPEYKPWALVIQDSNGENKIKMLSGGSKRTADGSEFEPKKKRKV

SEQ ID NO: 245 - protein, 1874 aa, Artificial Sequence
  Synthetic
MKRTADGSEFESPKKKRKVSSETGPVAVDPTLRRRIEPHEFEVFFDPRELRKETCLLYEINWGGRHSIWRHTSQNTNKHVEVNFIEKFTTERYFCPNTRCSITWFLSYSPCGECSRAITEFLSRYPHVTLFIYIARLYHHADPRNRQGLEDLISSGVTIQIMTEQESGYCWRNFVNYSPSNEAHWPRYPHLWVRLYVLELYCIILGLPPCLNILRRKQPQLTFFTIALQSCHYQRLPPHILWATGLKSGGSSGGSSGSETPGTSESATPESSGGSSGGSEIGKATAKYFFYSNIMNFFKTEITLANGEIRKRPLIETNGETGEIVWDKGRDFATVRKVLSMPQVNIVKKTEVQTGGFSKESILPKRNSDKLIARKKDWDPKKYGGFDSPTVAYSVLVVAKVEKGKSKKLKSVKELLGITIMERSSFEKNPIDFLEAKGYKEVKKDLIIKLPKYSLFELENGRKRMLASAGELQKGNELALPSKYVNFLYLASHYEKLKGSPEDNEQKQLFVEQHKHYLDEIIEQISEFSKRVILADANLDKVLSAYNKHRDKPIREQAENIIHLFTLTNLGAPAAFKYFDTTIDRKRYTSTKEVLDATLIHQSITGLYETRIDLSQLGGDGGSGGSGGSGGSGGSGGSGGMDKKYSIGLAIGTNSVGWAVITDEYKVPSKKFKVLGNTDRHSIKKNLIGALLFDSGETAEATRLKRTARRRYTRRKNRICYLQEIFSNEMAKVDDSFFHRLEESFLVEEDKKHERHPIFGNIVDEVAYHEKYPTIYHLRKKLVDSTDKADLRLIYLALAHMIKFRGHFLIEGDLNPDNSDVDKLFIQLVQTYNQLFEENPINASGVDAKAILSARLSKSRRLENLIAQLPGEKKNGLFGNLIALSLGLTPNFKSNFDLAEDAKLQLSKDTYDDDLDNLLAQIGDQYADLFLAAKNLSDAILLSDILRVNTEITKAPLSASMIKRYDEHHQDLTLLKALVRQQLPEKYKEIFFDQSKNGYAGYIDGGASQEEFYKFIKPILEKMDGTEELLVKLNREDLLRKQRTFDNGSIPHQIHLGELHAILRRQEDFYPFLKDNREKIEKILTFRIPYYVGPLARGNSRFAWMTRKSEETITPWNFEEVVDKGASAQSFIERMTNFDKNLPNEKVLPKHSLLYEYFTVYNELTKVKYVTEGMRKPAFLSGEQKKAIVDLLFKTNRKVTVKQLKEDYFKKIECFDSVEISGVEDRFNASLGTYHDLLKIIKDKDFLDNEENEDILEDIVLTLTLFEDREMIEERLKTYAHLFDDKVMKQLKRRRYTGWGRLSRKLINGIRDKQSGKTILDFLKSDGFANRNFMQLIHDDSLTFKEDIQKAQVSGQGDSLHEHIANLAGSPAIKKGILQTVKVVDELVKVMGRHKPENIVIEMARENQTTQKGQKNSRERMKRIEEGIKELGSQILKEHPVENTQLQNEKLYLYYLQNGRDMYVDQELDINRLSDYDVDHIVPQSFLKDDSIDNKVLTRSDKNRGKSDNVPSEEVVKKMKNYWRQLLNAKLITQRKFDNLTKAERGGLSELDKAGFIKRQLVETRQITKHVAQILDSRMNTKYDENDKLIREVKVITLKSKLVSDFRKDFQFYKVREINNYHHAHDAYLNAVVGTALIKKYPKLESEFVYGDYKVYDVRKMIAKSEQSGGSGGSGGSTNLSDIIEKETGKQLVIQESILMLPEEVEEVIGNKPESDILVHTAYDESTDENVMLLTSDAPEYKPWALVIQDSNGENKIKMLSGGSGGSGGSTNLSDIIEKETGKQLVIQESILMLPEEVEEVIGNKPESDILVHTAYDESTDENVMLLTSDAPEYKPWALVIQDSNGENKIKMLSGGSKRTADGSEFEPKKKRKV

SEQ ID NO: 246 - protein, 1874 aa, Artificial Sequence
  Synthetic
MKRTADGSEFESPKKKRKVSSETGPVAVDPTLRRRIEPHEFEVFFDPRELRKETCLLYEINWGGRHSIWRHTSQNTNKHVEVNFIEKFTTERYFCPNTRCSITWFLSYSPCGECSRAITEFLSRYPHVTLFIYIARLYHHADPENRQGLEDLISSGVTIQIMTEQESGYCWRNFVNYSPSNEAHWPRYPHLWVRLYVLELYCIILGLPPCLNILRRKQPQLTFFTIALQSCHYQRLPPHILWATGLKSGGSSGGSSGSETPGTSESATPESSGGSSGGSEIGKATAKYFFYSNIMNFFKTEITLANGEIRKRPLIETNGETGEIVWDKGRDFATVRKVLSMPQVNIVKKTEVQTGGFSKESILPKRNSDKLIARKKDWDPKKYGGFDSPTVAYSVLVVAKVEKGKSKKLKSVKELLGITIMERSSFEKNPIDFLEAKGYKEVKKDLIIKLPKYSLFELENGRKRMLASAGELQKGNELALPSKYVNFLYLASHYEKLKGSPEDNEQKQLFVEQHKHYLDEIIEQISEFSKRVILADANLDKVLSAYNKHRDKPIREQAENIIHLFTLTNLGAPAAFKYFDTTIDRKRYTSTKEVLDATLIHQSITGLYETRIDLSQLGGDGGSGGSGGSGGSGGSGGSGGMDKKYSIGLAIGTNSVGWAVITDEYKVPSKKFKVLGNTDRHSIKKNLIGALLFDSGETAEATRLKRTARRRYTRRKNRICYLQEIFSNEMAKVDDSFFHRLEESFLVEEDKKHERHPIFGNIVDEVAYHEKYPTIYHLRKKLVDSTDKADLRLIYLALAHMIKFRGHFLIEGDLNPDNSDVDKLFIQLVQTYNQLFEENPINASGVDAKAILSARLSKSRRLENLIAQLPGEKKNGLFGNLIALSLGLTPNFKSNFDLAEDAKLQLSKDTYDDDLDNLLAQIGDQYADLFLAAKNLSDAILLSDILRVNTEITKAPLSASMIKRYDEHHQDLTLLKALVRQQLPEKYKEIFFDQSKNGYAGYIDGGASQEEFYKFIKPILEKMDGTEELLVKLNREDLLRKQRTFDNGSIPHQIHLGELHAILRRQEDFYPFLKDNREKIEKILTFRIPYYVGPLARGNSRFAWMTRKSEETITPWNFEEVVDKGASAQSFIERMTNFDKNLPNEKVLPKHSLLYEYFTVYNELTKVKYVTEGMRKPAFLSGEQKKAIVDLLFKTNRKVTVKQLKEDYFKKIECFDSVEISGVEDRFNASLGTYHDLLKIIKDKDFLDNEENEDILEDIVLTLTLFEDREMIEERLKTYAHLFDDKVMKQLKRRRYTGWGRLSRKLINGIRDKQSGKTILDFLKSDGFANRNFMQLIHDDSLTFKEDIQKAQVSGQGDSLHEHIANLAGSPAIKKGILQTVKVVDELVKVMGRHKPENIVIEMARENQTTQKGQKNSRERMKRIEEGIKELGSQILKEHPVENTQLQNEKLYLYYLQNGRDMYVDQELDINRLSDYDVDHIVPQSFLKDDSIDNKVLTRSDKNRGKSDNVPSEEVVKKMKNYWRQLLNAKLITQRKFDNLTKAERGGLSELDKAGFIKRQLVETRQITKHVAQILDSRMNTKYDENDKLIREVKVITLKSKLVSDFRKDFQFYKVREINNYHHAHDAYLNAVVGTALIKKYPKLESEFVYGDYKVYDVRKMIAKSEQSGGSGGSGGSTNLSDIIEKETGKQLVIQESILMLPEEVEEVIGNKPESDILVHTAYDESTDENVMLLTSDAPEYKPWALVIQDSNGENKIKMLSGGSGGSGGSTNLSDIIEKETGKQLVIQESILMLPEEVEEVIGNKPESDILVHTAYDESTDENVMLLTSDAPEYKPWALVIQDSNGENKIKMLSGGSKRTADGSEFEPKKKRKV

SEQ ID NO: 247 - protein, 1874 aa, Artificial Sequence
  Synthetic
MKRTADGSEFESPKKKRKVSSETGPVAVDPTLRRRIEPHEFEVFFDPRELRKETCLLYEINWGGRHSIWRHTSQNTNKHVEVNFIEKFTTERYFCPNTRCSITWFLSWSPCGECSRAITEFLSRYPHVTLFIYIARLYHHADPENRQGLEDLISSGVTIQIMTEQESGYCWRNFVNYSPSNEAHWPRYPHLWVRLYVLELYCIILGLPPCLNILRRKQPQLTFFTIALQSCHYQRLPPHILWATGLKSGGSSGGSSGSETPGTSESATPESSGGSSGGSEIGKATAKYFFYSNIMNFFKTEITLANGEIRKRPLIETNGETGEIVWDKGRDFATVRKVLSMPQVNIVKKTEVQTGGFSKESILPKRNSDKLIARKKDWDPKKYGGFDSPTVAYSVLVVAKVEKGKSKKLKSVKELLGITIMERSSFEKNPIDFLEAKGYKEVKKDLIIKLPKYSLFELENGRKRMLASAGELQKGNELALPSKYVNFLYLASHYEKLKGSPEDNEQKQLFVEQHKHYLDEIIEQISEFSKRVILADANLDKVLSAYNKHRDKPIREQAENIIHLFTLTNLGAPAAFKYFDTTIDRKRYTSTKEVLDATLIHQSITGLYETRIDLSQLGGDGGSGGSGGSGGSGGSGGSGGMDKKYSIGLAIGTNSVGWAVITDEYKVPSKKFKVLGNTDRHSIKKNLIGALLFDSGETAEATRLKRTARRRYTRRKNRICYLQEIFSNEMAKVDDSFFHRLEESFLVEEDKKHERHPIFGNIVDEVAYHEKYPTIYHLRKKLVDSTDKADLRLIYLALAHMIKFRGHFLIEGDLNPDNSDVDKLFIQLVQTYNQLFEENPINASGVDAKAILSARLSKSRRLENLIAQLPGEKKNGLFGNLIALSLGLTPNFKSNFDLAEDAKLQLSKDTYDDDLDNLLAQIGDQYADLFLAAKNLSDAILLSDILRVNTEITKAPLSASMIKRYDEHHQDLTLLKALVRQQLPEKYKEIFFDQSKNGYAGYIDGGASQEEFYKFIKPILEKMDGTEELLVKLNREDLLRKQRTFDNGSIPHQIHLGELHAILRRQEDFYPFLKDNREKIEKILTFRIPYYVGPLARGNSRFAWMTRKSEETITPWNFEEVVDKGASAQSFIERMTNFDKNLPNEKVLPKHSLLYEYFTVYNELTKVKYVTEGMRKPAFLSGEQKKAIVDLLFKTNRKVTVKQLKEDYFKKIECFDSVEISGVEDRFNASLGTYHDLLKIIKDKDFLDNEENEDILEDIVLTLTLFEDREMIEERLKTYAHLFDDKVMKQLKRRRYTGWGRLSRKLINGIRDKQSGKTILDFLKSDGFANRNFMQLIHDDSLTFKEDIQKAQVSGQGDSLHEHIANLAGSPAIKKGILQTVKVVDELVKVMGRHKPENIVIEMARENQTTQKGQKNSRERMKRIEEGIKELGSQILKEHPVENTQLQNEKLYLYYLQNGRDMYVDQELDINRLSDYDVDHIVPQSFLKDDSIDNKVLTRSDKNRGKSDNVPSEEVVKKMKNYWRQLLNAKLITQRKFDNLTKAERGGLSELDKAGFIKRQLVETRQITKHVAQILDSRMNTKYDENDKLIREVKVITLKSKLVSDFRKDFQFYKVREINNYHHAHDAYLNAVVGTALIKKYPKLESEFVYGDYKVYDVRKMIAKSEQSGGSGGSGGSTNLSDIIEKETGKQLVIQESILMLPEEVEEVIGNKPESDILVHTAYDESTDENVMLLTSDAPEYKPWALVIQDSNGENKIKMLSGGSGGSGGSTNLSDIIEKETGKQLVIQESILMLPEEVEEVIGNKPESDILVHTAYDESTDENVMLLTSDAPEYKPWALVIQDSNGENKIKMLSGGSKRTADGSEFEPKKKRKV

SEQ ID NO: 248 - protein, 1874 aa, Artificial Sequence
  Synthetic
MKRTADGSEFESPKKKRKVSSETGPVAVDPTLRRRIEPHEFEVFFDPRELAAETCLLYEINWGGRHSIWRHTSQNTNKHVEVNFIEKFTTERYFCPNTRCSITWFLSWSPCGECSRAITEFLSRYPHVTLFIYIARLYHHADPRNRQGLRDLISSGVTIQIMTEQESGYCWRNFVNYSPSNEAHWPRYPHLWVRLYVLELYCIILGLPPCLNILRRKQPQLTFFTIALQSCHYQRLPPHILWATGLKSGGSSGGSSGSETPGTSESATPESSGGSSGGSEIGKATAKYFFYSNIMNFFKTEITLANGEIRKRPLIETNGETGEIVWDKGRDFATVRKVLSMPQVNIVKKTEVQTGGFSKESILPKRNSDKLIARKKDWDPKKYGGFDSPTVAYSVLVVAKVEKGKSKKLKSVKELLGITIMERSSFEKNPIDFLEAKGYKEVKKDLIIKLPKYSLFELENGRKRMLASAGELQKGNELALPSKYVNFLYLASHYEKLKGSPEDNEQKQLFVEQHKHYLDEIIEQISEFSKRVILADANLDKVLSAYNKHRDKPIREQAENIIHLFTLTNLGAPAAFKYFDTTIDRKRYTSTKEVLDATLIHQSITGLYETRIDLSQLGGDGGSGGSGGSGGSGGSGGSGGMDKKYSIGLAIGTNSVGWAVITDEYKVPSKKFKVLGNTDRHSIKKNLIGALLFDSGETAEATRLKRTARRRYTRRKNRICYLQEIFSNEMAKVDDSFFHRLEESFLVEEDKKHERHPIFGNIVDEVAYHEKYPTIYHLRKKLVDSTDKADLRLIYLALAHMIKFRGHFLIEGDLNPDNSDVDKLFIQLVQTYNQLFEENPINASGVDAKAILSARLSKSRRLENLIAQLPGEKKNGLFGNLIALSLGLTPNFKSNFDLAEDAKLQLSKDTYDDDLDNLLAQIGDQYADLFLAAKNLSDAILLSDILRVNTEITKAPLSASMIKRYDEHHQDLTLLKALVRQQLPEKYKEIFFDQSKNGYAGYIDGGASQEEFYKFIKPILEKMDGTEELLVKLNREDLLRKQRTFDNGSIPHQIHLGELHAILRRQEDFYPFLKDNREKIEKILTFRIPYYVGPLARGNSRFAWMTRKSEETITPWNFEEVVDKGASAQSFIERMTNFDKNLPNEKVLPKHSLLYEYFTVYNELTKVKYVTEGMRKPAFLSGEQKKAIVDLLFKTNRKVTVKQLKEDYFKKIECFDSVEISGVEDRFNASLGTYHDLLKIIKDKDFLDNEENEDILEDIVLTLTLFEDREMIEERLKTYAHLFDDKVMKQLKRRRYTGWGRLSRKLINGIRDKQSGKTILDFLKSDGFANRNFMQLIHDDSLTFKEDIQKAQVSGQGDSLHEHIANLAGSPAIKKGILQTVKVVDELVKVMGRHKPENIVIEMARENQTTQKGQKNSRERMKRIEEGIKELGSQILKEHPVENTQLQNEKLYLYYLQNGRDMYVDQELDINRLSDYDVDHIVPQSFLKDDSIDNKVLTRSDKNRGKSDNVPSEEVVKKMKNYWRQLLNAKLITQRKFDNLTKAERGGLSELDKAGFIKRQLVETRQITKHVAQILDSRMNTKYDENDKLIREVKVITLKSKLVSDFRKDFQFYKVREINNYHHAHDAYLNAVVGTALIKKYPKLESEFVYGDYKVYDVRKMIAKSEQSGGSGGSGGSTNLSDIIEKETGKQLVIQESILMLPEEVEEVIGNKPESDILVHTAYDESTDENVMLLTSDAPEYKPWALVIQDSNGENKIKMLSGGSGGSGGSTNLSDIIEKETGKQLVIQESILMLPEEVEEVIGNKPESDILVHTAYDESTDENVMLLTSDAPEYKPWALVIQDSNGENKIKMLSGGSKRTADGSEFEPKKKRKV

SEQ ID NO: 249 - DNA, 51 bp, Artificial Sequence
  Synthetic
ggtttcagacaaaatcaaaaagaaggaaggtgctcacattccttaaattaa

SEQ ID NO: 250 - RNA, 20 nt, Artificial Sequence
  Synthetic
auuuugucuaaaacccugua

SEQ ID NO: 251 - DNA, 51 bp, Artificial Sequence
  Synthetic
ggttttagacaaaatcaaaaagaaggaaggtgctcacattccttaaattaa

SEQ ID NO: 252 - DNA, 20 bp, Artificial Sequence
  Synthetic
attttccttacagggtttta

SEQ ID NO: 253 - DNA, 20 bp, Artificial Sequence
  Synthetic
tttccttacagggttttaga

SEQ ID NO: 254 - DNA, 20 bp, Artificial Sequence
  Synthetic
ttccttacagggttttagac

SEQ ID NO: 255 - DNA, 20 bp, Artificial Sequence
  Synthetic
tccttacagggttttagaca

SEQ ID NO: 256 - DNA, 20 bp, Artificial Sequence
  Synthetic
ccttacagggttttagacaa

SEQ ID NO: 257 - DNA, 20 bp, Artificial Sequence
  Synthetic
cttacagggttttagacaaa

SEQ ID NO: 258 - DNA, 20 bp, Artificial Sequence
  Synthetic
ttacagggttttagacaaaa

SEQ ID NO: 259 - DNA, 20 bp, Artificial Sequence
  Synthetic
tacagggttttagacaaaat

SEQ ID NO: 260 - DNA, 20 bp, Artificial Sequence
  Synthetic
acagggttttagacaaaatc

SEQ ID NO: 261 - DNA, 15 bp, Artificial Sequence
  Synthetic
gttttagacaaaatc

SEQ ID NO: 262 - DNA, 17 bp, Artificial Sequence
  Synthetic
ggttttagacaaaatca

SEQ ID NO: 263 - DNA, 19 bp, Artificial Sequence
  Synthetic
gggttttagacaaaatcaa

SEQ ID NO: 264 - DNA, 21 bp, Artificial Sequence
  Synthetic
agggttttagacaaaatcaaa

SEQ ID NO: 265 - DNA, 23 bp, Artificial Sequence
  Synthetic
cagggttttagacaaaatcaaaa

SEQ ID NO: 266 - DNA, 24 bp, Artificial Sequence
  Synthetic
acagggttttagacaaaatcaaaa

SEQ ID NO: 267 - DNA, 19 bp, Artificial Sequence
  Synthetic
catagagcagcactaaatg

SEQ ID NO: 268 - DNA, 19 bp, Artificial Sequence
  Synthetic
atagagcagcactaaatga

SEQ ID NO: 269 - DNA, 19 bp, Artificial Sequence
  Synthetic
tagagcagcactaaatgac

SEQ ID NO: 270 - DNA, 19 bp, Artificial Sequence
  Synthetic
agagcagcactaaatgaca

SEQ ID NO: 271 - DNA, 19 bp, Artificial Sequence
  Synthetic
gagcagcactaaatgacac

SEQ ID NO: 272 - DNA, 19 bp, Artificial Sequence
  Synthetic
agcagcactaaatgacacc

SEQ ID NO: 273 - DNA, 19 bp, Artificial Sequence
  Synthetic
gcagcactaaatgacacca

SEQ ID NO: 274 - DNA, 19 bp, Artificial Sequence
  Synthetic
cagcactaaatgacaccat

SEQ ID NO: 275 - DNA, 19 bp, Artificial Sequence
  Synthetic
agcactaaatgacaccata

SEQ ID NO: 276 - DNA, 19 bp, Artificial Sequence
  Synthetic
gcactaaatgacaccataa

SEQ ID NO: 277 - DNA, 15 bp, Artificial Sequence
  Synthetic
taaatgacaccataa

SEQ ID NO: 278 - DNA, 17 bp, Artificial Sequence
  Synthetic
ctaaatgacaccataaa

SEQ ID NO: 279 - DNA, 19 bp, Artificial Sequence
  Synthetic
actaaatgacaccataaag

SEQ ID NO: 280 - DNA, 21 bp, Artificial Sequence
  Synthetic
cactaaatgacaccataaaga

SEQ ID NO: 281 - DNA, 23 bp, Artificial Sequence
  Synthetic
gcactaaatgacaccataaagaa

SEQ ID NO: 282 - DNA, 25 bp, Artificial Sequence
  Synthetic
agcactaaatgacaccataaagaaa

SEQ ID NO: 283 - DNA, 20 bp, Artificial Sequence
  Synthetic
aatttcatggtacatgagtg

SEQ ID NO: 284 - DNA, 20 bp, Artificial Sequence
  Synthetic
tttcatggtacatgagtggc

SEQ ID NO: 285 - DNA, 20 bp, Artificial Sequence
  Synthetic
ttcatggtacatgagtggct

SEQ ID NO: 286 - DNA, 20 bp, Artificial Sequence
  Synthetic
tcatggtacatgagtggcta

SEQ ID NO: 287 - DNA, 20 bp, Artificial Sequence
  Synthetic
catggtacatgagtggctat

SEQ ID NO: 288 - DNA, 20 bp, Artificial Sequence
  Synthetic
atggtacatgagtggctatc

SEQ ID NO: 289 - DNA, 20 bp, Artificial Sequence
  Synthetic
tggtacatgagtggctatca

SEQ ID NO: 290 - DNA, 20 bp, Artificial Sequence
  Synthetic
ggtacatgagtggctatcat

SEQ ID NO: 291 - DNA, 20 bp, Artificial Sequence
  Synthetic
gtacatgagtggctatcata

SEQ ID NO: 292 - DNA, 15 bp, Artificial Sequence
  Synthetic
tgagtggctatcata

SEQ ID NO: 293 - DNA, 17 bp, Artificial Sequence
  Synthetic
atgagtggctatcatac

SEQ ID NO: 294 - DNA, 19 bp, Artificial Sequence
  Synthetic
catgagtggctatcatact

SEQ ID NO: 295 - DNA, 21 bp, Artificial Sequence
  Synthetic
acatgagtggctatcatactg

SEQ ID NO: 296 - DNA, 23 bp, Artificial Sequence
  Synthetic
tacatgagtggctatcatactgg

SEQ ID NO: 297 - DNA, 125 bp, Artificial Sequence
  Synthetic
  misc_feature (1)..(8): n is a, c, g, or t
nnnnnnnngtttttgtactctcaagatttagaaataaatcttgcagaagctacaaagataaggcttcatgccgaaatcaacaccctgtcattttatggcagggtgttttcgttatttaatttttt

SEQ ID NO: 298 - DNA, 121 bp, Artificial Sequence
  Synthetic
  misc_feature (1)..(18): n is a, c, g, or t
nnnnnnnnnnnnnnnnnngtttttgtactctcagaaatgcagaagctacaaagataaggcttcatgccgaaatcaacaccctgtcattttatggcagggtgttttcgttatttaatttttt

SEQ ID NO: 299 - DNA, 109 bp, Artificial Sequence
  Synthetic
  misc_feature (1)..(20): n is a, c, g, or t
nnnnnnnnnnnnnnnnnnnngtttttgtactctcagaaatgcagaagctacaaagataaggcttcatgccgaaatcaacaccctgtcattttatggcagggtgtttttt

SEQ ID NO: 300 - DNA, 102 bp, Artificial Sequence
  Synthetic
  misc_feature (1)..(20): n is a, c, g, or t
nnnnnnnnnnnnnnnnnnnngttttagagctagaaatagcaagttaaaataaggctagtccgttatcaacttgaaaaagtggcaccgagtcggtgctttttt

SEQ ID NO: 301 - DNA, 88 bp, Artificial Sequence
  Synthetic
  misc_feature (1)..(20): n is a, c, g, or t
nnnnnnnnnnnnnnnnnnnngttttagagctagaaatagcaagttaaaataaggctagtccgttatcaacttgaaaaagtgttttttt

SEQ ID NO: 302 - DNA, 76 bp, Artificial Sequence
  Synthetic
  misc_feature (1)..(20): n is a, c, g, or t
nnnnnnnnnnnnnnnnnnnngttttagagctagaaatagcaagttaaaataaggctagtccgttatcatttttttt

SEQ ID NO: 303 - RNA, 82 nt, Artificial Sequence
  Synthetic
guuuuagagcuagaaauagcaaguuaaaauaaaggcuaguccguuaucaacuugaaaaaguggcaccgagucggugcuuuuu

SEQ ID NO: 304 - RNA, 83 nt, Artificial Sequence
  Synthetic
guuuuagagcuagaaauagcaaguuaaaauaaggcuaguccguuaucaacuugaaaaaguggcaccgagucggugcuuuuuuu

SEQ ID NO: 305 - RNA, 103 nt, Artificial Sequence
  Synthetic
gguccacccaccugggcuccguuuuagagcuagaaauagcaaguuaaaauaaggcuaguccguuaucaacuugaaaaaguggcaccgagucggugcuuuuuuu

SEQ ID NO: 306 - RNA, 26 nt, Artificial Sequence
  Synthetic
uuuuugauuuugucuaaaacccugua

SEQ ID NO: 307 - RNA, 25 nt, Artificial Sequence
  Synthetic
uuuugauuuugucuaaaacccugua

SEQ ID NO: 308 - RNA, 24 nt, Artificial Sequence
  Synthetic
uuugauuuugucuaaaacccugua

SEQ ID NO: 309 - RNA, 23 nt, Artificial Sequence
  Synthetic
uugauuuugucuaaaacccugua

SEQ ID NO: 310 - RNA, 22 nt, Artificial Sequence
  Synthetic
ugauuuugucuaaaacccugua

SEQ ID NO: 311 - RNA, 21 nt, Artificial Sequence
  Synthetic
gauuuugucuaaaacccugua

SEQ ID NO: 312 - RNA, 20 nt, Artificial Sequence
  Synthetic
auuuugucuaaaacccugua

SEQ ID NO: 313 - RNA, 19 nt, Artificial Sequence
  Synthetic
uuuugucuaaaacccugua

SEQ ID NO: 314 - RNA, 18 nt, Artificial Sequence
  Synthetic
uuugucuaaaacccugua

SEQ ID NO: 315 - RNA, 17 nt, Artificial Sequence
  Synthetic
uugucuaaaacccugua

SEQ ID NO: 316 - RNA, 16 nt, Artificial Sequence
  Synthetic
ugucuaaaacccugua

SEQ ID NO: 317 - RNA, 20 nt, Artificial Sequence
  Synthetic
uuugucuaaaacccuguaag

SEQ ID NO: 318 - RNA, 20 nt, Artificial Sequence
  Synthetic
uuuugucuaaaacccuguaa

SEQ ID NO: 319 - RNA, 18 nt, Artificial Sequence
  Synthetic
ugauuuugucuaaaaccc

SEQ ID NO: 320 - RNA, 18 nt, Artificial Sequence
  Synthetic
gauuuugucuaaaacccu

SEQ ID NO: 321 - RNA, 18 nt, Artificial Sequence
  Synthetic
auuuugucuaaaacccug

SEQ ID NO: 322 - RNA, 18 nt, Artificial Sequence
  Synthetic
gucuaaaacccuguaagg

SEQ ID NO: 323 - RNA, 18 nt, Artificial Sequence
  Synthetic
ucuaaaacccuguaagga

SEQ ID NO: 324 - RNA, 20 nt, Artificial Sequence
  Synthetic
uuugcaggaaaugcuggcau

SEQ ID NO: 325 - RNA, 20 nt, Artificial Sequence
  Synthetic
uucucauuugcaggaaaugc

SEQ ID NO: 326 - RNA, 20 nt, Artificial Sequence
  Synthetic
cauuuagugcugcucuaugc

SEQ ID NO: 327 - RNA, 20 nt, Artificial Sequence
  Synthetic
caggaaaugcuggcauagag

SEQ ID NO: 328 - RNA, 20 nt, Artificial Sequence
  Synthetic
uugcaggaaaugcuggcaua

SEQ ID NO: 329 - RNA, 20 nt, Artificial Sequence
  Synthetic
auuugcaggaaaugcuggca

SEQ ID NO: 330 - RNA, 20 nt, Artificial Sequence
  Synthetic
uacaugaguggcuaucauac

SEQ ID NO: 331 - DNA, 20 bp, Artificial Sequence
  Synthetic
attttgtctaaaaccctgta

SEQ ID NO: 332 - RNA, 20 nt, Artificial Sequence
  Synthetic
auuuugucuaaaacccugua

SEQ ID NO: 333 - DNA, 20 bp, Artificial Sequence
  Synthetic
tttgtctaaaaccctgtaag

SEQ ID NO: 334 - DNA, 20 bp, Artificial Sequence
  Synthetic
ttttgtctaaaaccctgtaa

SEQ ID NO: 335 - DNA, 18 bp, Artificial Sequence
  Synthetic
tgattttgtctaaaaccc

SEQ ID NO: 336 - DNA, 18 bp, Artificial Sequence
  Synthetic
gattttgtctaaaaccct

SEQ ID NO: 337 - DNA, 18 bp, Artificial Sequence
  Synthetic
attttgtctaaaaccctg

SEQ ID NO: 338 - DNA, 18 bp, Artificial Sequence
  Synthetic
gtctaaaaccctgtaagg

SEQ ID NO: 339 - DNA, 18 bp, Artificial Sequence
  Synthetic
tctaaaaccctgtaagga

SEQ ID NO: 340 - RNA, 20 nt, Artificial Sequence
  Synthetic
uuugucuaaaacccuguaag

SEQ ID NO: 341 - RNA, 20 nt, Artificial Sequence
  Synthetic
uuuugucuaaaacccuguaa

SEQ ID NO: 342 - RNA, 18 nt, Artificial Sequence
  Synthetic
ugauuuugucuaaaaccc

SEQ ID NO: 343 - RNA, 18 nt, Artificial Sequence
  Synthetic
gauuuugucuaaaacccu

SEQ ID NO: 344 - RNA, 18 nt, Artificial Sequence
  Synthetic
auuuugucuaaaacccug

SEQ ID NO: 345 - RNA, 18 nt, Artificial Sequence
  Synthetic
gucuaaaacccuguaagg

SEQ ID NO: 346 - RNA, 18 nt, Artificial Sequence
  Synthetic
ucuaaaacccuguaagga

SEQ ID NO: 347 - DNA, 20 bp, Artificial Sequence
  Synthetic
tttgcaggaaatgctggcat

SEQ ID NO: 348 - DNA, 20 bp, Artificial Sequence
  Synthetic
ttctcatttgcaggaaatgc

SEQ ID NO: 349 - DNA, 20 bp, Artificial Sequence
  Synthetic
catttagtgctgctctatgc

SEQ ID NO: 350 - DNA, 20 bp, Artificial Sequence
  Synthetic
caggaaatgctggcatagag

SEQ ID NO: 351 - DNA, 20 bp, Artificial Sequence
  Synthetic
ttgcaggaaatgctggcata

SEQ ID NO: 352 - DNA, 20 bp, Artificial Sequence
  Synthetic
atttgcaggaaatgctggca

SEQ ID NO: 353 - DNA, 20 bp, Artificial Sequence
  Synthetic
tggcatagagcagcactaaa

SEQ ID NO: 354 - RNA, 20 nt, Artificial Sequence
  Synthetic
uuugcaggaaaugcuggcau

SEQ ID NO: 355 - RNA, 20 nt, Artificial Sequence
  Synthetic
uucucauuugcaggaaaugc

SEQ ID NO: 356 - RNA, 20 nt, Artificial Sequence
  Synthetic
cauuuagugcugcucuaugc

SEQ ID NO: 357 - RNA, 20 nt, Artificial Sequence
  Synthetic
caggaaaugcuggcauagag

SEQ ID NO: 358 - RNA, 20 nt, Artificial Sequence
  Synthetic
uugcaggaaaugcuggcaua

SEQ ID NO: 359 - RNA, 20 nt, Artificial Sequence
  Synthetic
auuugcaggaaaugcuggca

SEQ ID NO: 360 - RNA, 20 nt, Artificial Sequence
  Synthetic
uggcauagagcagcacuaaa

SEQ ID NO: 361 - DNA, 20 bp, Artificial Sequence
  Synthetic
tggcatagagcagcactaaa

SEQ ID NO: 362 - RNA, 20 nt, Artificial Sequence
  Synthetic
uggcauagagcagcacuaaa

SEQ ID NO: 363 - DNA, 251 bp, Artificial Sequence
  Synthetic
gtgaaacaaaatgctttttaacatccatataaagctatctatatatagctatctatatctatatagctattttttttaacttcctttattttccttacagggttttagacaaaatcaaaaagaaggaaggtgctcacattccttaaattaaggagtaagtctgccagcattatgaaagtgaatcttacttttgtaaaactttatggtttgtggaaaacaaatgtttttgaacatttaaaaagttcagatgt

SEQ ID NO: 364 - DNA, 20 bp, Artificial Sequence
  Synthetic
attttgtctaaaaccctgta

SEQ ID NO: 365 - RNA, 20 nt, Artificial Sequence
  Synthetic
auuuugucuaaaacccugua

SEQ ID NO: 366 - DNA, 20 bp, Artificial Sequence
  Synthetic
tttgtctaaaaccctgtaag

SEQ ID NO: 367 - RNA, 20 nt, Artificial Sequence
  Synthetic
uuugucuaaaacccuguaag

SEQ ID NO: 368 - DNA, 20 bp, Artificial Sequence
  Synthetic
ttttgtctaaaaccctgtaa

SEQ ID NO: 369 - RNA, 20 nt, Artificial Sequence
  Synthetic
uuuugucuaaaacccuguaa

SEQ ID NO: 370 - DNA, 18 bp, Artificial Sequence
  Synthetic
tgattttgtctaaaaccc

SEQ ID NO: 371 - RNA, 18 nt, Artificial Sequence
  Synthetic
ugauuuugucuaaaaccc

SEQ ID NO: 372 - DNA, 18 bp, Artificial Sequence
  Synthetic
gattttgtctaaaaccct

SEQ ID NO: 373 - RNA, 18 nt, Artificial Sequence
  Synthetic
gauuuugucuaaaacccu

SEQ ID NO: 374 - DNA, 18 bp, Artificial Sequence
  Synthetic
attttgtctaaaaccctg

SEQ ID NO: 375 - RNA, 18 nt, Artificial Sequence
  Synthetic
auuuugucuaaaacccug

SEQ ID NO: 376 - DNA, 18 bp, Artificial Sequence
  Synthetic
gtctaaaaccctgtaagg

SEQ ID NO: 377 - RNA, 18 nt, Artificial Sequence
  Synthetic
gucuaaaacccuguaagg

SEQ ID NO: 378 - DNA, 18 bp, Artificial Sequence
  Synthetic
tctaaaaccctgtaagga

SEQ ID NO: 379 - RNA, 18 nt, Artificial Sequence
  Synthetic
ucuaaaacccuguaagga

SEQ ID NO: 380 - DNA, 76 bp, Artificial Sequence
  Synthetic
ctctggttctaatttctcatttgcaggaaatgctggcatagagcagcactaaatgacaccactaaagaaacgatca

SEQ ID NO: 381 - DNA, 20 bp, Artificial Sequence
  Synthetic
tttgcaggaaatgctggcat

SEQ ID NO: 382 - RNA, 20 nt, Artificial Sequence
  Synthetic
uuugcaggaaaugcuggcau

SEQ ID NO: 383 - DNA, 20 bp, Artificial Sequence
  Synthetic
ttctcatttgcaggaaatgc

SEQ ID NO: 384 - RNA, 20 nt, Artificial Sequence
  Synthetic
uucucauuugcaggaaaugc

SEQ ID NO: 385 - DNA, 20 bp, Artificial Sequence
  Synthetic
catttagtgctgctctatgc

SEQ ID NO: 386 - RNA, 20 nt, Artificial Sequence
  Synthetic
cauuuagugcugcucuaugc

SEQ ID NO: 387 - DNA, 20 bp, Artificial Sequence
  Synthetic
caggaaatgctggcatagag

SEQ ID NO: 388 - RNA, 20 nt, Artificial Sequence
  Synthetic
caggaaaugcuggcauagag

SEQ ID NO: 389 - DNA, 20 bp, Artificial Sequence
  Synthetic
ttgcaggaaatgctggcata

SEQ ID NO: 390 - RNA, 20 nt, Artificial Sequence
  Synthetic
uugcaggaaaugcuggcaua

SEQ ID NO: 391 - DNA, 20 bp, Artificial Sequence
  Synthetic
atttgcaggaaatgctggca

SEQ ID NO: 392 - RNA, 20 nt, Artificial Sequence
  Synthetic
auuugcaggaaaugcuggca

SEQ ID NO: 393 - DNA, 20 bp, Artificial Sequence
  Synthetic
tggcatagagcagcactaaa

SEQ ID NO: 394 - RNA, 20 nt, Artificial Sequence
  Synthetic
uggcauagagcagcacuaaa

SEQ ID NO: 395 - DNA, 127 bp, Artificial Sequence
  Synthetic
ctttgggaagtatgttaatttcatggtacatgagtggctatcatactggctattatatggtaagtaatcactcagcatcttttcctgacaatttttttgtagttatgtgactttgttttgtaaattt

SEQ ID NO: 396 - DNA, 20 bp, Artificial Sequence
  Synthetic
tacatgagtggctatcatac

SEQ ID NO: 397 - RNA, 20 nt, Artificial Sequence
  Synthetic
uacaugaguggcuaucauac

SEQ ID NO: 398 - DNA, 20 bp, Artificial Sequence
  Synthetic
ttttccttacagggttttag

SEQ ID NO: 399 - DNA, 20 bp, Artificial Sequence
  Synthetic
atttcatggtacatgagtgg

SEQ ID NO: 400 - RNA, 10 nt, Artificial Sequence
  Synthetic
ugagccgcug

SEQ ID NO: 401 - RNA, 11 nt, Artificial Sequence
  Synthetic
ugagccgcugg

SEQ ID NO: 402 - protein, 37 aa, Artificial Sequence
  Synthetic
  misc_feature (3)..(29): Xaa can be any naturally occurring amino acid
  misc_feature (26)..(29): may be absent
  misc_feature (32)..(35): Xaa can be any naturally occurring amino acid
  misc_feature (34)..(35): may be absent
  misc_feature (36)..(36): Xaa can be any naturally occurring amino acid
HEXXXXXXXXXXXXXXXXXXXXXXXXXXXPCXXXXXC

SEQ ID NO: 403 - protein, 166 aa, Escherichia coli
SEVEFSHEYWMRHALTLAKRARDEREVPVGAVLVLNNRVIGEGWNRAIGLHDPTAHAEIMALRQGGLVMQNYRLIDATLYVTFEPCVMCAGAMIHSRIGRVVFGVRNAKTGAAGSLMDVLHYPGMNHRVEITEGILADECAALLCYFFRMPRQVFNAQKKAQSSTD

SEQ ID NO: 404 - DNA, 498 bp, Escherichia coli
tctgaggtggagttttcccacgagtactggatgagacatgccctgaccctggccaagagggcacgcgatgagagggaggtgcctgtgggagccgtgctggtgctgaacaatagagtgatcggcgagggctggaacagagccatcggcctgcacgacccaacagcccatgccgaaattatggccctgagacagggcggcctggtcatgcagaactacagactgattgacgccaccctgtacgtgacattcgagccttgcgtgatgtgcgccggcgccatgatccactctaggatcggccgcgtggtgtttggcgtgaggaacgcaaaaaccggcgccgcaggctccctgatggacgtgctgcactaccccggcatgaatcaccgcgtcgaaattaccgagggaatcctggcagatgaatgtgccgccctgctgtgctatttctttcggatgcctagacaggtgttcaatgctcagaagaaggcccagagctccaccgac

SEQ ID NO: 405 - RNA, 102 nt, Artificial Sequence
  Synthetic
auuuugucuaaaacccuguaguuuuagagcuagaaauagcaaguuaaaauaaaggcuaguccguuaucaacuugaaaaaguggcaccgagucggugcuuuuu

SEQ ID NO: 406 - RNA, 103 nt, Artificial Sequence
  Synthetic
auuuugucuaaaacccuguaguuuuagagcuagaaauagcaaguuaaaauaaggcuaguccguuaucaacuugaaaaaguggcaccgagucggugcuuuuuuu

SEQ ID NO: 407 - protein, 1367 aa, Artificial Sequence
  Synthetic
DKKYSIGLAIGTNSVGWAVITDEYKVPSKKFKVLGNTDRHSIKKNLIGALLFDSGETAEATRLKRTARRRYTRRKNRICYLQEIFSNEMAKVDDSFFHRLEESFLVEEDKKHERHPIFGNIVDEVAYHEKYPTIYHLRKKLVDSTDKADLRLIYLALAHMIKFRGHFLIEGDLNPDNSDVDKLFIQLVQTYNQLFEENPINASGVDAKAILSARLSKSRRLENLIAQLPGEKKNGLFGNLIALSLGLTPNFKSNFDLAEDAKLQLSKDTYDDDLDNLLAQIGDQYADLFLAAKNLSDAILLSDILRVNTEITKAPLSASMIKRYDEHHQDLTLLKALVRQQLPEKYKEIFFDQSKNGYAGYIDGGASQEEFYKFIKPILEKMDGTEELLVKLNREDLLRKQRTFDNGSIPHQIHLGELHAILRRQEDFYPFLKDNREKIEKILTFRIPYYVGPLARGNSRFAWMTRKSEETITPWNFEEVVDKGASAQSFIERMTNFDKNLPNEKVLPKHSLLYEYFTVYNELTKVKYVTEGMRKPAFLSGEQKKAIVDLLFKTNRKVTVKQLKEDYFKKIECFDSVEISGVEDRFNASLGTYHDLLKIIKDKDFLDNEENEDILEDIVLTLTLFEDREMIEERLKTYAHLFDDKVMKQLKRRRYTGWGRLSRKLINGIRDKQSGKTILDFLKSDGFANRNFMQLIHDDSLTFKEDIQKAQVSGQGDSLHEHIANLAGSPAIKKGILQTVKVVDELVKVMGRHKPENIVIEMARENQTTQKGQKNSRERMKRIEEGIKELGSQILKEHPVENTQLQNEKLYLYYLQNGRDMYVDQELDINRLSDYDVDHIVPQSFLKDDSIDNKVLTRSDKNRGKSDNVPSEEVVKKMKNYWRQLLNAKLITQRKFDNLTKAERGGLSELDKAGFIKRQLVETRQITKHVAQILDSRMNTKYDENDKLIREVKVITLKSKLVSDFRKDFQFYKVREINNYHHAHDAYLNAVVGTALIKKYPKLESEFVYGDYKVYDVRKMIAKSEQEIGKATAKYFFYSNIMNFFKTEITLANGEIRKRPLIETNGETGEIVWDKGRDFATVRKVLSMPQVNIVKKTEVQTGGFSKESILPKRNSDKLIARKKDWDPKKYGGFVSPTVAYSVLVVAKVEKGKSKKLKSVKELLGITIMERSSFEKNPIDFLEAKGYKEVKKDLIIKLPKYSLFELENGRKRMLASARELQKGNELALPSKYVNFLYLASHYEKLKGSPEDNEQKQLFVEQHKHYLDEIIEQISEFSKRVILADANLDKVLSAYNKHRDKPIREQAENIIHLFTLTNLGAPAAFKYFDTTIDRKQYRSTKEVLDATLIHQSITGLYETRIDLSQLGGD

SEQ ID NO: 408 - DNA, 20 bp, Artificial Sequence
  Synthetic
gtctaaaaccctgtaaggaa

SEQ ID NO: 409 - DNA, 20 bp, Artificial Sequence
  Synthetic
tgtctaaaaccctgtaagga

SEQ ID NO: 410 - DNA, 20 bp, Artificial Sequence
  Synthetic
ttgtctaaaaccctgtaagg

SEQ ID NO: 411 - DNA, 23 bp, Artificial Sequence
  Synthetic
attttgtctaaaaccctgtaagg

SEQ ID NO: 412 - DNA, 23 bp, Artificial Sequence
  Synthetic
gattttgtctaaaaccctgtaag

SEQ ID NO: 413 - DNA, 23 bp, Artificial Sequence
  Synthetic
tgattttgtctaaaaccctgtaa

SEQ ID NO: 414 - DNA, 21 bp, Artificial Sequence
  Synthetic
gaaaccctgtaaggaaaataa

SEQ ID NO: 415 - DNA, 21 bp, Artificial Sequence
  Synthetic
gtttgtctaaaaccctgtaag

SEQ ID NO: 416 - DNA, 21 bp, Artificial Sequence
  Synthetic
gttttgtctaaaaccctgtaa

SEQ ID NO: 417 - DNA, 20 bp, Artificial Sequence
  Synthetic
gtgagcaccttccttctttt

SEQ ID NO: 418 - DNA, 21 bp, Artificial Sequence
  Synthetic
gatgtgagcaccttccttctt

SEQ ID NO: 419 - DNA, 21 bp, Artificial Sequence
  Synthetic
gactccttaatttaaggaatg

SEQ ID NO: 420 - DNA, 21 bp, Artificial Sequence
  Synthetic
gcagacttactccttaattta

SEQ ID NO: 421 - DNA, 21 bp, Artificial Sequence
  Synthetic
gcagacttactccttaattta

SEQ ID NO: 422 - DNA, 21 bp, Artificial Sequence
  Synthetic
gtaatgctggcagacttactc

SEQ ID NO: 423 - DNA, 21 bp, Artificial Sequence
  Synthetic
gttcactttcataatgctggc

SEQ ID NO: 424 - DNA, 21 bp, Artificial Sequence
  Synthetic
gaagattcactttcataatgc

SEQ ID NO: 425 - DNA, 21 bp, Artificial Sequence
  Synthetic
gacaaaagtaagattcacttt

SEQ ID NO: 426 - DNA, 21 bp, Artificial Sequence
  Synthetic
gacttcctttattttccttac

SEQ ID NO: 427 - DNA, 21 bp, Artificial Sequence
  Synthetic
gaacttcctttattttcctta

SEQ ID NO: 428 - DNA, 21 bp, Artificial Sequence
  Synthetic
gtttccttacagggttttaga

SEQ ID NO: 429 - DNA, 21 bp, Artificial Sequence
  Synthetic
gtttagacaaaatcaaaaaga

SEQ ID NO: 430 - DNA, 21 bp, Artificial Sequence
  Synthetic
gttagacaaaatcaaaaagaa

SEQ ID NO: 431 - DNA, 21 bp, Artificial Sequence
  Synthetic
gtagacaaaatcaaaaagaag

SEQ ID NO: 432 - DNA, 20 bp, Artificial Sequence
  Synthetic
gacaaaatcaaaaagaagga

SEQ ID NO: 433 - DNA, 21 bp, Artificial Sequence
  Synthetic
gaaggaaggtgctcacattcc

SEQ ID NO: 434 - DNA, 21 bp, Artificial Sequence
  Synthetic
gtgctcacattccttaaatta

SEQ ID NO: 435 - DNA, 20 bp, Artificial Sequence
  Synthetic
gtgctcacattccttaaatt

SEQ ID NO: 436 - DNA, 21 bp, Artificial Sequence
  Synthetic
gtgctcacattccttaaatta

SEQ ID NO: 437 - DNA, 21 bp, Artificial Sequence
  Synthetic
gcacattccttaaattaagga

SEQ ID NO: 438 - DNA, 20 bp, Artificial Sequence
  Synthetic
gagtaagtctgccagcatta

SEQ ID NO: 439 - DNA, 20 bp, Artificial Sequence
  Synthetic
agtaagtctgccagcattat

SEQ ID NO: 440 - DNA, 20 bp, Artificial Sequence
  Synthetic
gtctgccagcattatgaaag

SEQ ID NO: 441 - DNA, 21 bp, Artificial Sequence
  Synthetic
gagtctgccagcattatgaaa

SEQ ID NO: 442 - DNA, 21 bp, Artificial Sequence
  Synthetic
gcttacttttgtaaaacttta

SEQ ID NO: 443 - DNA, 21 bp, Artificial Sequence
  Synthetic
gttgtaaaactttatggtttg

SEQ ID NO: 444 - DNA, 81 bp, Artificial Sequence
  Synthetic
aagcctctggttctaatttctcatttgcaggaaatgctggcatagagcagcactaaatgacaccactaaagaaacgatcag

SEQ ID NO: 445 - DNA, 21 bp, Artificial Sequence
  Synthetic
gtttcctgcaaatgagaaatt

SEQ ID NO: 446 - DNA, 20 bp, Artificial Sequence
  Synthetic
gccagcatttcctgcaaatg

SEQ ID NO: 447 - DNA, 21 bp, Artificial Sequence
  Synthetic
gatgccagcatttcctgcaaa

SEQ ID NO: 448 - DNA, 20 bp, Artificial Sequence
  Synthetic
gctctatgccagcatttcct

SEQ ID NO: 449 - DNA, 21 bp, Artificial Sequence
  Synthetic
gaatgctggcatagagcagca

SEQ ID NO: 450 - DNA, 21 bp, Artificial Sequence
  Synthetic
gtggcatagagcagcactaaa

SEQ ID NO: 451 - RNA, 23 nt, Artificial Sequence
  Synthetic
gauuuugucuaaaacccuguaag

SEQ ID NO: 452 - RNA, 20 nt, Artificial Sequence
  Synthetic
uugucuaaaacccuguaagg

SEQ ID NO: 453 - RNA, 20 nt, Artificial Sequence
  Synthetic
ugucuaaaacccuguaagga

SEQ ID NO: 454 - RNA, 20 nt, Artificial Sequence
  Synthetic
gucuaaaacccuguaaggaa

SEQ ID NO: 455 - RNA, 20 nt, Artificial Sequence
  Synthetic
aaaaguaagauucacuuuca

SEQ ID NO: 456 - RNA, 20 nt, Artificial Sequence
  Synthetic
caaaaguaagauucacuuuc

SEQ ID NO: 457 - RNA, 20 nt, Artificial Sequence
  Synthetic
acaaaaguaagauucacuuu

SEQ ID NO: 458 - RNA, 20 nt, Artificial Sequence
  Synthetic
uacaaaaguaagauucacuu

SEQ ID NO: 459-461 - skipped (3 entries)

SEQ ID NO: 462 - DNA, 24 bp, Artificial Sequence
  Synthetic
atttgcaggaaatgctggcataga

SEQ ID NO: 463 - DNA, 24 bp, Artificial Sequence
  Synthetic
tttctcatttgcaggaaatgctgg

SEQ ID NO: 464 - DNA, 48 bp, Artificial Sequence
  Synthetic
gtcatttagtgctgctctatgccagcatttcctgcaaatgagaaatta

SEQ ID NO: 465 - protein, 4 aa, Artificial Sequence
  Synthetic
EMLA

SEQ ID NO: 466 - protein, 18 aa, Artificial Sequence
  Synthetic
KRTADGSEFESPKKKRKV

SEQ ID NO: 467 - protein, 17 aa, Artificial Sequence
  Synthetic
KRTADGSEFEPKKKRKV

SEQ ID NO: 468 - protein, 19 aa, Artificial Sequence
  Synthetic
NLSKRPAAIKKAGQAKKKK

SEQ ID NO: 469 - protein, 11 aa, Artificial Sequence
  Synthetic
RQRRNELKRSF

SEQ ID NO: 470 - protein, 38 aa, Artificial Sequence
  Synthetic
NQSSNFGPMKGGNFGGRSSGPYGGGGQYFAKPRNQGGY

SEQ ID NO: 471 - protein, 16 aa, Artificial Sequence
  Synthetic
  misc_feature (3)..(12): Xaa can be any naturally occurring amino acid
KRXXXXXXXXXXKKKL

SEQ ID NO: 472 - protein, 1605 aa, Artificial Sequence
  Synthetic
MKRTADGSEFESPKKKRKVSEVEFSHEYWMRHALTLAKRARDEREVPVGAVLVLNNRVIGEGWNRAIGLHDPTAHAEIMALRQGGLVMQNYRLIDATLYVTFEPCVMCAGAMIHSRIGRVVFGWRNSKRGAAGSLMNVLNYPGMNHRVEITEGILADECAALLCDFYRMPRQVFNAQKKAQSSINSGGSSGGSSGSETPGTSESATPESSGGSSGGSDKKYSIGLAIGTNSVGWAVITDEYKVPSKKFKVLGNTDRHSIKKNLIGALLFDSGETAEATRLKRTARRRYTRRKNRICYLQEIFSNEMAKVDDSFFHRLEESFLVEEDKKHERHPIFGNIVDEVAYHEKYPTIYHLRKKLVDSTDKADLRLIYLALAHMIKFRGHFLIEGDLNPDNSDVDKLFIQLVQTYNQLFEENPINASGVDAKAILSARLSKSRRLENLIAQLPGEKKNGLFGNLIALSLGLTPNFKSNFDLAEDAKLQLSKDTYDDDLDNLLAQIGDQYADLFLAAKNLSDAILLSDILRVNTEITKAPLSASMIKRYDEHHQDLTLLKALVRQQLPEKYKEIFFDQSKNGYAGYIDGGASQEEFYKFIKPILEKMDGTEELLVKLNREDLLRKQRTFDNGSIPHQIHLGELHAILRRQEDFYPFLKDNREKIEKILTFRIPYYVGPLARGNSRFAWMTRKSEETITPWNFEEVVDKGASAQSFIERMTNFDKNLPNEKVLPKHSLLYEYFTVYNELTKVKYVTEGMRKPAFLSGEQKKAIVDLLFKTNRKVTVKQLKEDYFKKIECFDSVEISGVEDRFNASLGTYHDLLKIIKDKDFLDNEENEDILEDIVLTLTLFEDREMIEERLKTYAHLFDDKVMKQLKRRRYTGWGRLSRKLINGIRDKQSGKTILDFLKSDGFANRNFMQLIHDDSLTFKEDIQKAQVSGQGDSLHEHIANLAGSPAIKKGILQTVKVVDELVKVMGRHKPENIVIEMARENQTTQKGQKNSRERMKRIEEGIKELGSQILKEHPVENTQLQNEKLYLYYLQNGRDMYVDQELDINRLSDYDVDHIVPQSFLKDDSIDNKVLTRSDKNRGKSDNVPSEEVVKKMKNYWRQLLNAKLITQRKFDNLTKAERGGLSELDKAGFIKRQLVETRQITKHVAQILDSRMNTKYDENDKLIREVKVITLKSKLVSDFRKDFQFYKVREINNYHHAHDAYLNAVVGTALIKKYPKLESEFVYGDYKVYDVRKMIAKSEQEIGKATAKYFFYSNIMNFFKTEITLANGEIRKRPLIETNGETGEIVWDKGRDFATVRKVLSMPQVNIVKKTEVQTGGFSKESILPKRNSDKLIARKKDWDPKKYGGFDSPTVAYSVLVVAKVEKGKSKKLKSVKELLGITIMERSSFEKNPIDFLEAKGYKEVKKDLIIKLPKYSLFELENGRKRMLASAGELQKGNELALPSKYVNFLYLASHYEKLKGSPEDNEQKQLFVEQHKHYLDEIIEQISEFSKRVILADANLDKVLSAYNKHRDKPIREQAENIIHLFTLTNLGAPAAFKYFDTTIDRKRYTSTKEVLDATLIHQSITGLYETRIDLSQLGGDSGGSKRTADGSEFEPKKKRKV

SEQ ID NO: 473 - protein, 1803 aa, Artificial Sequence
  Synthetic
MKRTADGSEFESPKKKRKVSEVEFSHEYWMRHALTLAKRAWDEREVPVGAVLVHNNRVIGEGWNRPIGRHDPTAHAEIMALRQGGLVMQNYRLIDATLYVTLEPCVMCAGAMIHSRIGRVVFGARDAKTGAAGSLMDVLHHPGMNHRVEITEGILADECAALLSDFFRMRRQEIKAQKKAQSSTDSGGSSGGSSGSETPGTSESATPESSGGSSGGSSEVEFSHEYWMRHALTLAKRARDEREVPVGAVLVLNNRVIGEGWNRAIGLHDPTAHAEIMALRQGGLVMQNYRLIDATLYVTFEPCVMCAGAMIHSRIGRVVFGVRNSKRGAAGSLMNVLNYPGMNHRVEITEGILADECAALLCDFYRMPRQVFNAQKKAQSSINSGGSSGGSSGSETPGTSESATPESSGGSSGGSDKKYSIGLAIGTNSVGWAVITDEYKVPSKKFKVLGNTDRHSIKKNLIGALLFDSGETAEATRLKRTARRRYTRRKNRICYLQEIFSNEMAKVDDSFFHRLEESFLVEEDKKHERHPIFGNIVDEVAYHEKYPTIYHLRKKLVDSTDKADLRLIYLALAHMIKFRGHFLIEGDLNPDNSDVDKLFIQLVQTYNQLFEENPINASGVDAKAILSARLSKSRRLENLIAQLPGEKKNGLFGNLIALSLGLTPNFKSNFDLAEDAKLQLSKDTYDDDLDNLLAQIGDQYADLFLAAKNLSDAILLSDILRVNTEITKAPLSASMVKRYDEHHQDLTLLKALVRQQLPEKYKEIFFDQSKNGYAGYIDGGASQEEFYKFIKPILEKMDGTEELLVKLNREDLLRKQRTFDNGIIPHQIHLGELHAILRRQGDFYPFLKDNREKIEKILTFRIPYYVGPLARGNSRFAWMTRKSEETITPWNFEEVVDKGASAQSFIERMTNFDKNLPNEKVLPKHSLLYEYFTVYNELTKVKYVTEGMRKPAFLSGEQKKAIVDLLFKTNRKVTVKQLKEDYFKKIECFDSVEISGVEDRFNASLGTYHDLLKIIKDKDFLDNEENEDILEDIVLTLTLFEDREMIEERLKTYAHLFDDKVMKQLKRLRYTGWGRLSRKLINGIRDKQSGKTILDFLKSDGFANRNFMQLIHDDSLTFKEDIQKAQVSCQGDSLHEHIANLAGSPAIKKGILQTVKVVDELIKVMGGHKPENIVIEMARENQTTQKGQKNSRERMKRIEEGIKELGSQILKEHPVENTQLQNEKLYLYYLQNGRDMYVDQELDINRLSDYDVDHIVPQSFLKDDSIENKVLTRSDKNRGKSDNVPSEEVVKKMKNYWRQLLNAKLITQRKFDNLTKAERGGLSELDKAGFIKRQLAETRQITKHVAQILDSRMNTKYDENDKLIREVKVITLKSKLVSDFRKDFQFYKVREINNYHHAHDAYLNAVVGTALIKKYPKLESEFVYGDYKVYDVRKMIAKSEQEIGKATAKYFFYSNIMNFFKTEITLANGEIRKRPLIETNGETGEIVWDKGRDFATVRKVLSMPQVNIVKKTEVQTGGFSKESILPKGNSDKLIARKKDWDPKKYGGFNSPTVAYSVLVVAKVEKGKSKKLKSVKELLGITIMERSSFEKNPIGFLEAKGYKEVKKDLIIKLPKYSLFELENGRKRMLASASVLHKGNELALPSKYVNFLYLASHYEKLKGSSEDNKQKQLFVEQHKHYLDEIIEQISEFSKRVILADANLDKVLSAYNKHRDKPIREQAENIIHLFTLTNLGASAAFKYFDTTIGRKLYTSTKEVLDATLIHQSITGLYETRIDLSQLGGDSGGSKRTADGSEFEPKKKRKV

SEQ ID NO: 474 - protein, 1605 aa, Artificial Sequence
  Synthetic
MKRTADGSEFESPKKKRKVSEVEFSHEYWMRHALTLAKRARDEREVPVGAVLVLNNRVIGEGWNRAIGLHDPTAHAEIMALRQGGLVMQNYRLIDATLYVTFEPCVMCAGAMIHSRIGRVVFGVRNSKRGAAGSLMNVLNYPGMNHRVEITEGILADECAALLCDFYRMPRQVFNAQKKAQSSINSGGSSGGSSGSETPGTSESATPESSGGSSGGSDKKYSIGLAIGTNSVGWAVITDEYKVPSKKFKVLGNTDRHSIKKNLIGALLFDSGETAEATRLKRTARRRYTRRKNRICYLQEIFSNEMAKVDDSFFHRLEESFLVEEDKKHERHPIFGNIVDEVAYHEKYPTIYHLRKKLVDSTDKADLRLIYLALAHMIKFRGHFLIEGDLNPDNSDVDKLFIQLVQTYNQLFEENPINASGVDAKAILSARLSKSRRLENLIAQLPGEKKNGLFGNLIALSLGLTPNFKSNFDLAEDAKLQLSKDTYDDDLDNLLAQIGDQYADLFLAAKNLSDAILLSDILRVNTEITKAPLSASMVKRYDEHHQDLTLLKALVRQQLPEKYKEIFFDQSKNGYAGYIDGGASQEEFYKFIKPILEKMDGTEELLVKLNREDLLRKQRTFDNGIIPHQIHLGELHAILRRQGDFYPFLKDNREKIEKILTFRIPYYVGPLARGNSRFAWMTRKSEETITPWNFEEVVDKGASAQSFIERMTNFDKNLPNEKVLPKHSLLYEYFTVYNELTKVKYVTEGMRKPAFLSGEQKKAIVDLLFKTNRKVTVKQLKEDYFKKIECFDSVEISGVEDRFNASLGTYHDLLKIIKDKDFLDNEENEDILEDIVLTLTLFEDREMIEERLKTYAHLFDDKVMKQLKRLRYTGWGRLSRKLINGIRDKQSGKTILDFLKSDGFANRNFMQLIHDDSLTFKEDIQKAQVSCQGDSLHEHIANLAGSPAIKKGILQTVKVVDELIKVMGGHKPENIVIEMARENQTTQKGQKNSRERMKRIEEGIKELGSQILKEHPVENTQLQNEKLYLYYLQNGRDMYVDQELDINRLSDYDVDHIVPQSFLKDDSIENKVLTRSDKNRGKSDNVPSEEVVKKMKNYWRQLLNAKLITQRKFDNLTKAERGGLSELDKAGFIKRQLAETRQITKHVAQILDSRMNTKYDENDKLIREVKVITLKSKLVSDFRKDFQFYKVREINNYHHAHDAYLNAVVGTALIKKYPKLESEFVYGDYKVYDVRKMIAKSEQEIGKATAKYFFYSNIMNFFKTEITLANGEIRKRPLIETNGETGEIVWDKGRDFATVRKVLSMPQVNIVKKTEVQTGGFSKESILPKGNSDKLIARKKDWDPKKYGGFNSPTVAYSVLVVAKVEKGKSKKLKSVKELLGITIMERSSFEKNPIGFLEAKGYKEVKKDLIIKLPKYSLFELENGRKRMLASASVLHKGNELALPSKYVNFLYLASHYEKLKGSSEDNKQKQLFVEQHKHYLDEIIEQISEFSKRVILADANLDKVLSAYNKHRDKPIREQAENIIHLFTLTNLGASAAFKYFDTTIGRKLYTSTKEVLDATLIHQSITGLYETRIDLSQLGGDSGGSKRTADGSEFEPKKKRKV

SEQ ID NO: 475 - protein, 1795 aa, Artificial Sequence
  Synthetic
MKRTADGSEFESPKKKRKVSEVEFSHEYWMRHALTLAKRAWDEREVPVGAVLVHNNRVIGEGWNRPIGRHDPTAHAEIMALRQGGLVMQNYRLIDATLYVTLEPCVMCAGAMIHSRIGRVVFGARDAKTGAAGSLMDVLHHPGMNHRVEITEGILADECAALLSDFFRMRRQEIKAQKKAQSSTDSGGSSGGSSGSETPGTSESATPESSGGSSGGSSEVEFSHEYWMRHALTLAKRARDEREVPVGAVLVLNNRVIGEGWNRAIGLHDPTAHAEIMALRQGGLVMQNYRLIDATLYVTFEPCVMCAGAMIHSRIGRVVFGVRNSKRGAAGSLMNVLNYPGMNHRVEITEGILADECAALLCDFYRMPRQVFNAQKKAQSSINSGGSSGGSSGSETPGTSESATPESSGGSSGGSDKKYSIGLAIGTNSVGWAVITDEYKVPSKKFKVLGNTDRHSIKKNLIGALLFDSGETAEATRLKRTARRRYTRRKNRICYLQEIFSNEMAKVDDSFFHRLEESFLVEEDKKHERHPIFGNIVDEVAYHEKYPTIYHLRKKLVDSTDKADLRLIYLALAHMIKFRGHFLIEGDLNPDNSDVDKLFIQLVQTYNQLFEENPINASGVDAKAILSARLSKSRRLENLIAQLPGEKKNGLFGNLIALSLGLTPNFKSNFDLAEDAKLQLSKDTYDDDLDNLLAQIGDQYADLFLAAKNLSDAILLSDILRVNTEITKAPLSASMIKRYDEHHQDLTLLKALVRQQLPEKYKEIFFDQSKNGYAGYIDGGASQEEFYKFIKPILEKMDGTEELLVKLNREDLLRKQRTFDNGSIPHQIHLGELHAILRRQEDFYPFLKDNREKIEKILTFRIPYYVGPLARGNSRFAWMTRKSEETITPWNFEEVVDKGASAQSFIERMTNFDKNLPNEKVLPKHSLLYEYFTVYNELTKVKYVTEGMRKPAFLSGEQKKAIVDLLFKTNRKVTVKQLKEDYFKKIECFDSVEISGVEDRFNASLGTYHDLLKIIKDKDFLDNEENEDILEDIVLTLTLFEDREMIEERLKTYAHLFDDKVMKQLKRRRYTGWGRLSRKLINGIRDKQSGKTILDFLKSDGFANRNFMQLIHDDSLTFKEDIQKAQVSGQGDSLHEHIANLAGSPAIKKGILQTVKVVDELVKVMGRHKPENIVIEMARENQTTQKGQKNSRERMKRIEEGIKELGSQILKEHPVENTQLQNEKLYLYYLQNGRDMYVDQELDINRLSDYDVDHIVPQSFLKDDSIDNKVLTRSDKNRGKSDNVPSEEVVKKMKNYWRQLLNAKLITQRKFDNLTKAERGGLSELDKAGFIKRQLVETRQITKHVAQILDSRMNTKYDENDKLIREVKVITLKSKLVSDFRKDFQFYKVREINNYHHAHDAYLNAVVGTALIKKYPKLESEFVYGDYKVYDVRKMIAKSEQEIGKATAKYFFYSNIMNFFKTEITLANGEIRKRPLIETNGETGEIVWDKGRDFATVRKVLSMPQVNIVKKTEIQTVGQNGGLFDDNPKSPLEVTPSKLVPLKKELNPKKYGGYQKPTTAYPVLLITDTKQLIPISVMNKKQFEQNPVKFLRDRGYQQVGKNDFIKLPKYTLVDIGDGIKRLWASSKEIHKGNQLVVSKKSQILLYHAHHLDSDLSNDYLQNHNQQFDVLFNEIISFSKKCKLGKEHIQKIENVYSNKKNSASIEELAESFIKLLGFTQLGATSPFNFLGVKLNQKQYKGKKDYILPCTEGTLIRQSITGLYETRVDLSKIGEDSGGSKRTADGSEFEPKKKRKV

SEQ ID NO: 476 - protein, 1597 aa, Artificial Sequence
  Synthetic
MKRTADGSEFESPKKKRKVSEVEFSHEYWMRHALTLAKRARDEREVPVGAVLVLNNRVIGEGWNRAIGLHDPTAHAEIMALRQGGLVMQNYRLIDATLYVTFEPCVMCAGAMIHSRIGRVVFGVRNSKRGAAGSLMNVLNYPGMNHRVEITEGILADECAALLCDFYRMPRQVFNAQKKAQSSINSGGSSGGSSGSETPGTSESATPESSGGSSGGSDKKYSIGLAIGTNSVGWAVITDEYKVPSKKFKVLGNTDRHSIKKNLIGALLFDSGETAEATRLKRTARRRYTRRKNRICYLQEIFSNEMAKVDDSFFHRLEESFLVEEDKKHERHPIFGNIVDEVAYHEKYPTIYHLRKKLVDSTDKADLRLIYLALAHMIKFRGHFLIEGDLNPDNSDVDKLFIQLVQTYNQLFEENPINASGVDAKAILSARLSKSRRLENLIAQLPGEKKNGLFGNLIALSLGLTPNFKSNFDLAEDAKLQLSKDTYDDDLDNLLAQIGDQYADLFLAAKNLSDAILLSDILRVNTEITKAPLSASMIKRYDEHHQDLTLLKALVRQQLPEKYKEIFFDQSKNGYAGYIDGGASQEEFYKFIKPILEKMDGTEELLVKLNREDLLRKQRTFDNGSIPHQIHLGELHAILRRQEDFYPFLKDNREKIEKILTFRIPYYVGPLARGNSRFAWMTRKSEETITPWNFEEVVDKGASAQSFIERMTNFDKNLPNEKVLPKHSLLYEYFTVYNELTKVKYVTEGMRKPAFLSGEQKKAIVDLLFKTNRKVTVKQLKEDYFKKIECFDSVEISGVEDRFNASLGTYHDLLKIIKDKDFLDNEENEDILEDIVLTLTLFEDREMIEERLKTYAHLFDDKVMKQLKRRRYTGWGRLSRKLINGIRDKQSGKTILDFLKSDGFANRNFMQLIHDDSLTFKEDIQKAQVSGQGDSLHEHIANLAGSPAIKKGILQTVKVVDELVKVMGRHKPENIVIEMARENQTTQKGQKNSRERMKRIEEGIKELGSQILKEHPVENTQLQNEKLYLYYLQNGRDMYVDQELDINRLSDYDVDHIVPQSFLKDDSIDNKVLTRSDKNRGKSDNVPSEEVVKKMKNYWRQLLNAKLITQRKFDNLTKAERGGLSELDKAGFIKRQLVETRQITKHVAQILDSRMNTKYDENDKLIREVKVITLKSKLVSDFRKDFQFYKVREINNYHHAHDAYLNAVVGTALIKKYPKLESEFVYGDYKVYDVRKMIAKSEQEIGKATAKYFFYSNIMNFFKTEITLANGEIRKRPLIETNGETGEIVWDKGRDFATVRKVLSMPQVNIVKKTEIQTVGQNGGLFDDNPKSPLEVTPSKLVPLKKELNPKKYGGYQKPTTAYPVLLITDTKQLIPISVMNKKQFEQNPVKFLRDRGYQQVGKNDFIKLPKYTLVDIGDGIKRLWASSKEIHKGNQLVVSKKSQILLYHAHHLDSDLSNDYLQNHNQQFDVLFNEIISFSKKCKLGKEHIQKIENVYSNKKNSASIEELAESFIKLLGFTQLGATSPFNFLGVKLNQKQYKGKKDYILPCTEGTLIRQSITGLYETRVDLSKIGEDSGGSKRTADGSEFEPKKKRKV

SEQ ID NO: 477 - protein, 1823 aa, Artificial Sequence
  Synthetic
MKRTADGSEFESPKKKRKVSEVEFSHEYWMRHALTLAKRAWDEREVPVGAVLVHNNRVIGEGWNRPIGRHDPTAHAEIMALRQGGLVMQNYRLIDATLYVTLEPCVMCAGAMIHSRIGRVVFGARDAKTGAAGSLMDVLHHPGMNHRVEITEGILADECAALLSDFFRMRRQEIKAQKKAQSSTDSGGSSGGSSGSETPGTSESATPESSGGSSGGSSEVEFSHEYWMRHALTLAKRARDEREVPVGAVLVLNNRVIGEGWNRAIGLHDPTAHAEIMALRQGGLVMQNYRLIDATLYVTFEPCVMCAGAMIHSRIGRVVFGVRNSKRGAAGSLMNVLNYPGMNHRVEITEGILADECAALLCDFYRMPRQVFNAQKKAQSSINSGGSSGGSSGSETPGTSESATPESSGGSSGGSNIMNFFKTEITLANGEIRKRPLIETNGETGEIVWDKGRDFATVRKVLSMPQVNIVKKTEVQTGGFSKESIRPKRNSDKLIARKKDWDPKKYGGFVSPTVAYSVLVVAKVEKGKSKKLKSVKELLGITIMERSSFEKNPIDFLEAKGYKEVKKDLIIKLPKYSLFELENGRKRMLASARFLQKGNELALPSKYVNFLYLASHYEKLKGSPEDNEQKQLFVEQHKHYLDEIIEQISEFSKRVILADANLDKVLSAYNKHRDKPIREQAENIIHLFTLTNLGAPRAFKYFDTTIDRKVYRSTKEVLDATLIHQSITGLYETRIDLSQLGGDGGSGGSGGSGGSGGSGGSGGDKKYSIGLAIGTNSVGWAVITDEYKVPSKKFKVLGNTDRHSIKKNLIGALLFDSGETAEATRLKRTARRRYTRRKNRICYLQEIFSNEMAKVDDSFFHRLEESFLVEEDKKHERHPIFGNIVDEVAYHEKYPTIYHLRKKLVDSTDKADLRLIYLALAHMIKFRGHFLIEGDLNPDNSDVDKLFIQLVQTYNQLFEENPINASGVDAKAILSARLSKSRRLENLIAQLPGEKKNGLFGNLIALSLGLTPNFKSNFDLAEDAKLQLSKDTYDDDLDNLLAQIGDQYADLFLAAKNLSDAILLSDILRVNTEITKAPLSASMIKRYDEHHQDLTLLKALVRQQLPEKYKEIFFDQSKNGYAGYIDGGASQEEFYKFIKPILEKMDGTEELLVKLNREDLLRKQRTFDNGSIPHQIHLGELHAILRRQEDFYPFLKDNREKIEKILTFRIPYYVGPLARGNSRFAWMTRKSEETITPWNFEEVVDKGASAQSFIERMTNFDKNLPNEKVLPKHSLLYEYFTVYNELTKVKYVTEGMRKPAFLSGEQKKAIVDLLFKTNRKVTVKQLKEDYFKKIECFDSVEISGVEDRFNASLGTYHDLLKIIKDKDFLDNEENEDILEDIVLTLTLFEDREMIEERLKTYAHLFDDKVMKQLKRRRYTGWGRLSRKLINGIRDKQSGKTILDFLKSDGFANRNFMQLIHDDSLTFKEDIQKAQVSGQGDSLHEHIANLAGSPAIKKGILQTVKVVDELVKVMGRHKPENIVIEMARENQTTQKGQKNSRERMKRIEEGIKELGSQILKEHPVENTQLQNEKLYLYYLQNGRDMYVDQELDINRLSDYDVDHIVPQSFLKDDSIDNKVLTRSDKNRGKSDNVPSEEVVKKMKNYWRQLLNAKLITQRKFDNLTKAERGGLSELDKAGFIKRQLVETRQITKHVAQILDSRMNTKYDENDKLIREVKVITLKSKLVSDFRKDFQFYKVREINNYHHAHDAYLNAVVGTALIKKYPKLESEFVYGDYKVYDVRKMIAKSEQEIGKATAKYFFYSSGGSKRTADGSEFEPKKKRKV

SEQ ID NO: 478 - protein, 1625 aa, Artificial Sequence
  Synthetic
MKRTADGSEFESPKKKRKVSEVEFSHEYWMRHALTLAKRARDEREVPVGAVLVLNNRVIGEGWNRAIGLHDPTAHAEIMALRQGGLVMQNYRLIDATLYVTFEPCVMCAGAMIHSRIGRVVFGVRNSKRGAAGSLMNVLNYPGMNHRVEITEGILADECAALLCDFYRMPRQVFNAQKKAQSSINSGGSSGGSSGSETPGTSESATPESSGGSSGGSNIMNFFKTEITLANGEIRKRPLIETNGETGEIVWDKGRDFATVRKVLSMPQVNIVKKTEVQTGGFSKESIRPKRNSDKLIARKKDWDPKKYGGFVSPTVAYSVLVVAKVEKGKSKKLKSVKELLGITIMERSSFEKNPIDFLEAKGYKEVKKDLIIKLPKYSLFELENGRKRMLASARFLQKGNELALPSKYVNFLYLASHYEKLKGSPEDNEQKQLFVEQHKHYLDEIIEQISEFSKRVILADANLDKVLSAYNKHRDKPIREQAENIIHLFTLTNLGAPRAFKYFDTTIDRKVYRSTKEVLDATLIHQSITGLYETRIDLSQLGGDGGSGGSGGSGGSGGSGGSGGDKKYSIGLAIGTNSVGWAVITDEYKVPSKKFKVLGNTDRHSIKKNLIGALLFDSGETAEATRLKRTARRRYTRRKNRICYLQEIFSNEMAKVDDSFFHRLEESFLVEEDKKHERHPIFGNIVDEVAYHEKYPTIYHLRKKLVDSTDKADLRLIYLALAHMIKFRGHFLIEGDLNPDNSDVDKLFIQLVQTYNQLFEENPINASGVDAKAILSARLSKSRRLENLIAQLPGEKKNGLFGNLIALSLGLTPNFKSNFDLAEDAKLQLSKDTYDDDLDNLLAQIGDQYADLFLAAKNLSDAILLSDILRVNTEITKAPLSASMIKRYDEHHQDLTLLKALVRQQLPEKYKEIFFDQSKNGYAGYIDGGASQEEFYKFIKPILEKMDGTEELLVKLNREDLLRKQRTFDNGSIPHQIHLGELHAILRRQEDFYPFLKDNREKIEKILTFRIPYYVGPLARGNSRFAWMTRKSEETITPWNFEEVVDKGASAQSFIERMTNFDKNLPNEKVLPKHSLLYEYFTVYNELTKVKYVTEGMRKPAFLSGEQKKAIVDLLFKTNRKVTVKQLKEDYFKKIECFDSVEISGVEDRFNASLGTYHDLLKIIKDKDFLDNEENEDILEDIVLTLTLFEDREMIEERLKTYAHLFDDKVMKQLKRRRYTGWGRLSRKLINGIRDKQSGKTILDFLKSDGFANRNFMQLIHDDSLTFKEDIQKAQVSGQGDSLHEHIANLAGSPAIKKGILQTVKVVDELVKVMGRHKPENIVIEMARENQTTQKGQKNSRERMKRIEEGIKELGSQILKEHPVENTQLQNEKLYLYYLQNGRDMYVDQELDINRLSDYDVDHIVPQSFLKDDSIDNKVLTRSDKNRGKSDNVPSEEVVKKMKNYWRQLLNAKLITQRKFDNLTKAERGGLSELDKAGFIKRQLVETRQITKHVAQILDSRMNTKYDENDKLIREVKVITLKSKLVSDFRKDFQFYKVREINNYHHAHDAYLNAVVGTALIKKYPKLESEFVYGDYKVYDVRKMIAKSEQEIGKATAKYFFYSSGGSKRTADGSEFEPKKKRKV

SEQ ID NO: 479 - protein, 1803 aa, Artificial Sequence
  Synthetic
MKRTADGSEFESPKKKRKVSEVEFSHEYWMRHALTLAKRAWDEREVPVGAVLVHNNRVIGEGWNRPIGRHDPTAHAEIMALRQGGLVMQNYRLIDATLYVTLEPCVMCAGAMIHSRIGRVVFGARDAKTGAAGSLMDVLHHPGMNHRVEITEGILADECAALLSDFFRMRRQEIKAQKKAQSSTDSGGSSGGSSGSETPGTSESATPESSGGSSGGSSEVEFSHEYWMRHALTLAKRARDEREVPVGAVLVLNNRVIGEGWNRAIGLHDPTAHAEIMALRQGGLVMQNYRLIDATLYVTFEPCVMCAGAMIHSRIGRVVFGVRNSKRGAAGSLMNVLNYPGMNHRVEITEGILADECAALLCDFYRMPRQVFNAQKKAQSSINSGGSSGGSSGSETPGTSESATPESSGGSSGGSDKKYSIGLAIGTNSVGWAVITDEYKVPSKKFKVLGNTDRHSIKKNLIGALLFDSGETAEATRLKRTARRRYTRRKNRICYLQEIFSNEMAKVDDSFFHRLEESFLVEEDKKHERHPIFGNIVDEVAYHEKYPTIYHLRKKLVDSTDKADLRLIYLALAHMIKFRGHFLIEGDLNPDNSDVDKLFIQLVQTYNQLFEENPINASGVDAKAILSARLSKSRRLENLIAQLPGEKKNGLFGNLIALSLGLTPNFKSNFDLAEDAKLQLSKDTYDDDLDNLLAQIGDQYADLFLAAKNLSDAILLSDILRVNTEITKAPLSASMVKRYDEHHQDLTLLKALVRQQLPEKYKEIFFDQSKNGYAGYIDGGASQEEFYKFIKPILEKMDGTEELLVKLNREDLLRKQRTFDNGIIPHQIHLGELHAILRRQGDFYPFLKDNREKIEKILTFRIPYYVGPLARGNSRFAWMTRKSEETITPWNFEEVVDKGASAQSFIERMTNFDKNLPNEKVLPKHSLLYEYFTVYNELTKVKYVTEGMRKPAFLSGEQKKAIVDLLFKTNRKVTVKQLKEDYFKKIECFDSVEISGVEDRFNASLGTYHDLLKIIKDKDFLDNEENEDILEDIVLTLTLFEDREMIEERLKTYAHLFDDKVMKQLKRLRYTGWGRLSRKLINGIRDKQSGKTILDFLKSDGFANRNFMQLIHDDSLTFKEDIQKAQVSCQGDSLHEHIANLAGSPAIKKGILQTVKVVDELIKVMGGHKPENIVIEMARENQTTQKGQKNSRERMKRIEEGIKELGSQILKEHPVENTQLQNEKLYLYYLQNGRDMYVDQELDINRLSDYDVDHIVPQSFLKDDSIENKVLTRSDKNRGKSDNVPSEEVVKKMKNYWRQLLNAKLITQRKFDNLTKAERGGLSELDKAGFIKRQLAETRQITKHVAQILDSRMNTKYDENDKLIREVKVITLKSKLVSDFRKDFQFYKVREINNYHHAHDAYLNAVVGTALIKKYPKLESEFVYGDYKVYDVRKMIAKSEQEIGKATAKYFFYSNIMNFFKTEITLANGEIRKRPLIETNGETGEIVWDKGRDFATVRKVLSMPQVNIVKKTEVQTGGFSKESILPKGNSDKLIARKKDWDPKKYGGFNSPTVAYSVLVVAKVEKGKSKKLKSVKELLGITIMERSSFEKNPIDFLEAKGYKEVKKDLIIKLPKYSLFELENGRKRMLASAGVLQKGNELALPSKYVNFLYLASHYEKLKGSPEDNEQKQLFVEQHKHYLDEIIEQISEFSKRVILADANLDKVLSAYNKHRDKPIREQAENIIHLFTLTNLGAPAAFKYFDTTINRKQYNTTKEVLDATLIRQSITGLYETRIDLSQLGGDSGGSKRTADGSEFEPKKKRKV

SEQ ID NO: 480 - protein, 1605 aa, Artificial Sequence
  Synthetic
MKRTADGSEFESPKKKRKVSEVEFSHEYWMRHALTLAKRARDEREVPVGAVLVLNNRVIGEGWNRAIGLHDPTAHAEIMALRQGGLVMQNYRLIDATLYVTFEPCVMCAGAMIHSRIGRVVFGVRNSKRGAAGSLMNVLNYPGMNHRVEITEGILADECAALLCDFYRMPRQVFNAQKKAQSSINSGGSSGGSSGSETPGTSESATPESSGGSSGGSDKKYSIGLAIGTNSVGWAVITDEYKVPSKKFKVLGNTDRHSIKKNLIGALLFDSGETAEATRLKRTARRRYTRRKNRICYLQEIFSNEMAKVDDSFFHRLEESFLVEEDKKHERHPIFGNIVDEVAYHEKYPTIYHLRKKLVDSTDKADLRLIYLALAHMIKFRGHFLIEGDLNPDNSDVDKLFIQLVQTYNQLFEENPINASGVDAKAILSARLSKSRRLENLIAQLPGEKKNGLFGNLIALSLGLTPNFKSNFDLAEDAKLQLSKDTYDDDLDNLLAQIGDQYADLFLAAKNLSDAILLSDILRVNTEITKAPLSASMVKRYDEHHQDLTLLKALVRQQLPEKYKEIFFDQSKNGYAGYIDGGASQEEFYKFIKPILEKMDGTEELLVKLNREDLLRKQRTFDNGIIPHQIHLGELHAILRRQGDFYPFLKDNREKIEKILTFRIPYYVGPLARGNSRFAWMTRKSEETITPWNFEEVVDKGASAQSFIERMTNFDKNLPNEKVLPKHSLLYEYFTVYNELTKVKYVTEGMRKPAFLSGEQKKAIVDLLFKTNRKVTVKQLKEDYFKKIECFDSVEISGVEDRFNASLGTYHDLLKIIKDKDFLDNEENEDILEDIVLTLTLFEDREMIEERLKTYAHLFDDKVMKQLKRLRYTGWGRLSRKLINGIRDKQSGKTILDFLKSDGFANRNFMQLIHDDSLTFKEDIQKAQVSCQGDSLHEHIANLAGSPAIKKGILQTVKVVDELIKVMGGHKPENIVIEMARENQTTQKGQKNSRERMKRIEEGIKELGSQILKEHPVENTQLQNEKLYLYYLQNGRDMYVDQELDINRLSDYDVDHIVPQSFLKDDSIENKVLTRSDKNRGKSDNVPSEEVVKKMKNYWRQLLNAKLITQRKFDNLTKAERGGLSELDKAGFIKRQLAETRQITKHVAQILDSRMNTKYDENDKLIREVKVITLKSKLVSDFRKDFQFYKVREINNYHHAHDAYLNAVVGTALIKKYPKLESEFVYGDYKVYDVRKMIAKSEQEIGKATAKYFFYSNIMNFFKTEITLANGEIRKRPLIETNGETGEIVWDKGRDFATVRKVLSMPQVNIVKKTEVQTGGFSKESILPKGNSDKLIARKKDWDPKKYGGFNSPTVAYSVLVVAKVEKGKSKKLKSVKELLGITIMERSSFEKNPIDFLEAKGYKEVKKDLIIKLPKYSLFELENGRKRMLASAGVLQKGNELALPSKYVNFLYLASHYEKLKGSPEDNEQKQLFVEQHKHYLDEIIEQISEFSKRVILADANLDKVLSAYNKHRDKPIREQAENIIHLFTLTNLGAPAAFKYFDTTINRKQYNTTKEVLDATLIRQSITGLYETRIDLSQLGGDSGGSKRTADGSEFEPKKKRKV

SEQ ID NO: 481 - protein, 1803 aa, Artificial Sequence
  Synthetic
MKRTADGSEFESPKKKRKVSEVEFSHEYWMRHALTLAKRAWDEREVPVGAVLVHNNRVIGEGWNRPIGRHDPTAHAEIMALRQGGLVMQNYRLIDATLYVTLEPCVMCAGAMIHSRIGRVVFGARDAKTGAAGSLMDVLHHPGMNHRVEITEGILADECAALLSDFFRMRRQEIKAQKKAQSSTDSGGSSGGSSGSETPGTSESATPESSGGSSGGSSEVEFSHEYWMRHALTLAKRARDEREVPVGAVLVLNNRVIGEGWNRAIGLHDPTAHAEIMALRQGGLVMQNYRLIDATLYVTFEPCVMCAGAMIHSRIGRVVFGVRNSKRGAAGSLMNVLNYPGMNHRVEITEGILADECAALLCDFYRMPRQVFNAQKKAQSSINSGGSSGGSSGSETPGTSESATPESSGGSSGGSDKKYSIGLAIGTNSVGWAVITDEYKVPSKKFKVLGNTDRHSIKKNLIGALLFDSGETAEATRLKRTARRRYTRRKNRICYLQEIFSNEMAKVDDSFFHRLEESFLVEEDKKHERHPIFGNIVDEVAYHEKYPTIYHLRKKLVDSTDKADLRLIYLALAHMIKFRGHFLIEGDLNPDNSDVDKLFIQLVQTYNQLFEENPINASGVDAKAILSARLSKSRRLENLIAQLPGEKKNGLFGNLIALSLGLTPNFKSNFDLAEDAKLQLSKDTYDDDLDNLLAQIGDQYADLFLAAKNLSDAILLSDILRVNTEITKAPLSASMVKRYDEHHQDLTLLKALVRQQLPEKYKEIFFDQSKNGYAGYIDGGASQEEFYKFIKPILEKMDGTEELLVKLNREDLLRKQRTFDNGIIPHQIHLGELHAILRRQGDFYPFLKDNREKIEKILTFRIPYYVGPLARGNSRFAWMTRKSEETITPWNFEEVVDKGASAQSFIERMTNFDKNLPNEKVLPKHSLLYEYFTVYNELTKVKYVTEGMRKPAFLSGEQKKAIVDLLFKTNRKVTVKQLKEDYFKKIECFDSVEISGVEDRFNASLGTYHDLLKIIKDKDFLDNEENEDILEDIVLTLTLFEDREMIEERLKTYAHLFDDKVMKQLKRLRYTGWGRLSRKLINGIRDKQSGKTILDFLKSDGFANRNFMQLIHDDSLTFKEDIQKAQVSCQGDSLHEHIANLAGSPAIKKGILQTVKVVDELIKVMGGHKPENIVIEMARENQTTQKGQKNSRERMKRIEEGIKELGSQILKEHPVENTQLQNEKLYLYYLQNGRDMYVDQELDINRLSDYDVDHIVPQSFLKDDSIENKVLTRSDKNRGKSDNVPSEEVVKKMKNYWRQLLNAKLITQRKFDNLTKAERGGLSELDKAGFIKRQLAETRQITKHVAQILDSRMNTKYDENDKLIREVKVITLKSKLVSDFRKDFQFYKVREINNYHHAHDAYLNAVVGTALIKKYPKLESEFVYGDYKVYDVRKMIAKSEQEIGKATAKYFFYSNIMNFFKTEITLANGEIRKRPLIETNGETGEIVWDKGRDFATVRKVLSMPQVNIVKKTEVQTGGFSKESILPKGNSDKLIARKKDWDPKKYGGFNSPTAAYSVLVVAKVEKGKSKKLKSVKELLGITIMERSSFEKNPIGFLEAKGYKEVKKDLIIKLPKYSLFELENGRKRMLASAGVLHKGNELALPSKYVNFLYLASHYEKLKGSPEDNEQKQLFVEQHKHYLDEIIEQISEFSKRVILADANLDKVLSAYNKHRDKPIREQAENIIHLFTLTNLGVPAAFKYFDTTIDKKRYTSTKEVLDATLIHQSITGLYETRIDLSQLGGDSGGSKRTADGSEFEPKKKRKV

SEQ ID NO: 482 - protein, 1605 aa, Artificial Sequence
  Synthetic
MKRTADGSEFESPKKKRKVSEVEFSHEYWMRHALTLAKRARDEREVPVGAVLVLNNRVIGEGWNRAIGLHDPTAHAEIMALRQGGLVMQNYRLIDATLYVTFEPCVMCAGAMIHSRIGRVVFGVRNSKRGAAGSLMNVLNYPGMNHRVEITEGILADECAALLCDFYRMPRQVFNAQKKAQSSINSGGSSGGSSGSETPGTSESATPESSGGSSGGSDKKYSIGLAIGTNSVGWAVITDEYKVPSKKFKVLGNTDRHSIKKNLIGALLFDSGETAEATRLKRTARRRYTRRKNRICYLQEIFSNEMAKVDDSFFHRLEESFLVEEDKKHERHPIFGNIVDEVAYHEKYPTIYHLRKKLVDSTDKADLRLIYLALAHMIKFRGHFLIEGDLNPDNSDVDKLFIQLVQTYNQLFEENPINASGVDAKAILSARLSKSRRLENLIAQLPGEKKNGLFGNLIALSLGLTPNFKSNFDLAEDAKLQLSKDTYDDDLDNLLAQIGDQYADLFLAAKNLSDAILLSDILRVNTEITKAPLSASMVKRYDEHHQDLTLLKALVRQQLPEKYKEIFFDQSKNGYAGYIDGGASQEEFYKFIKPILEKMDGTEELLVKLNREDLLRKQRTFDNGIIPHQIHLGELHAILRRQGDFYPFLKDNREKIEKILTFRIPYYVGPLARGNSRFAWMTRKSEETITPWNFEEVVDKGASAQSFIERMTNFDKNLPNEKVLPKHSLLYEYFTVYNELTKVKYVTEGMRKPAFLSGEQKKAIVDLLFKTNRKVTVKQLKEDYFKKIECFDSVEISGVEDRFNASLGTYHDLLKIIKDKDFLDNEENEDILEDIVLTLTLFEDREMIEERLKTYAHLFDDKVMKQLKRLRYTGWGRLSRKLINGIRDKQSGKTILDFLKSDGFANRNFMQLIHDDSLTFKEDIQKAQVSCQGDSLHEHIANLAGSPAIKKGILQTVKVVDELIKVMGGHKPENIVIEMARENQTTQKGQKNSRERMKRIEEGIKELGSQILKEHPVENTQLQNEKLYLYYLQNGRDMYVDQELDINRLSDYDVDHIVPQSFLKDDSIENKVLTRSDKNRGKSDNVPSEEVVKKMKNYWRQLLNAKLITQRKFDNLTKAERGGLSELDKAGFIKRQLAETRQITKHVAQILDSRMNTKYDENDKLIREVKVITLKSKLVSDFRKDFQFYKVREINNYHHAHDAYLNAVVGTALIKKYPKLESEFVYGDYKVYDVRKMIAKSEQEIGKATAKYFFYSNIMNFFKTEITLANGEIRKRPLIETNGETGEIVWDKGRDFATVRKVLSMPQVNIVKKTEVQTGGFSKESILPKGNSDKLIARKKDWDPKKYGGFNSPTAAYSVLVVAKVEKGKSKKLKSVKELLGITIMERSSFEKNPIGFLEAKGYKEVKKDLIIKLPKYSLFELENGRKRMLASAGVLHKGNELALPSKYVNFLYLASHYEKLKGSPEDNEQKQLFVEQHKHYLDEIIEQISEFSKRVILADANLDKVLSAYNKHRDKPIREQAENIIHLFTLTNLGVPAAFKYFDTTIDKKRYTSTKEVLDATLIHQSITGLYETRIDLSQLGGDSGGSKRTADGSEFEPKKKRKV

SEQ ID NO: 483 - protein, 1489 aa, Artificial Sequence
  Synthetic
MKRTADGSEFESPKKKRKVSEVEFSHEYWMRHALTLAKRAWDEREVPVGAVLVHNNRVIGEGWNRPIGRHDPTAHAEIMALRQGGLVMQNYRLIDATLYVTLEPCVMCAGAMIHSRIGRVVFGARDAKTGAAGSLMDVLHHPGMNHRVEITEGILADECAALLSDFFRMRRQEIKAQKKAQSSTDSGGSSGGSSGSETPGTSESATPESSGGSSGGSSEVEFSHEYWMRHALTLAKRARDEREVPVGAVLVLNNRVIGEGWNRAIGLHDPTAHAEIMALRQGGLVMQNYRLIDATLYVTFEPCVMCAGAMIHSRIGRVVFGVRNSKRGAAGSLMNVLNYPGMNHRVEITEGILADECAALLCDFYRMPRQVFNAQKKAQSSINSGGSSGGSSGSETPGTSESATPESSGGSSGGSGKRNYILGLAIGITSVGYGIIDYETRDVIDAGVRLFKEANVENNEGRRSKRGARRLKRRRRHRIQRVKKLLFDYNLLTDHSELSGINPYEARVKGLSQKLSEEEFSAALLHLAKRRGVHNVNEVEEDTGNELSTKEQISRNSKALEEKYVAELQLERLKKDGEVRGSINRFKTSDYVKEAKQLLKVQKAYHQLDQSFIDTYIDLLETRRTYYEGPGEGSPFGWKDIKEWYEMLMGHCTYFPEELRSVKYAYNADLYNALNDLNNLVITRDENEKLEYYEKFQIIENVFKQKKKPTLKQIAKEILVNEEDIKGYRVTSTGKPEFTNLKVYHDIKDITARKEIIENAELLDQIAKILTIYQSSEDIQEELTNLNSELTQEEIEQISNLKGYTGTHNLSLKAINLILDELWHTNDNQIAIFNRLKLVPKKVDLSQQKEIPTTLVDDFILSPVVKRSFIQSIKVINAIIKKYGLPNDIIIELAREKNSKDAQKMINEMQKRNRQTNERIEEIIRTTGKENAKYLIEKIKLHDMQEGKCLYSLEAIPLEDLLNNPFNYEVDHIIPRSVSFDNSFNNKVLVKQEENSKKGNRTPFQYLSSSDSKISYETFKKHILNLAKGKGRISKTKKEYLLEERDINRFSVQKDFINRNLVDTRYATRGLMNLLRSYFRVNNLDVKVKSINGGFTSFLRRKWKFKKERNKGYKHHAEDALIIANADFIFKEWKKLDKAKKVMENQMFEEKQAESMPEIETEQEYKEIFITPHQIKHIKDFKDYKYSHRVDKKPNRKLINDTLYSTRKDDKGNTLIVNNLNGLYDKDNDKLKKLINKSPEKLLMYHHDPQTYQKLKLIMEQYGDEKNPLYKYYEETGNYLTKYSKKDNGPVIKKIKYYGNKLNAHLDITDDYPNSRNKVVKLSLKPYRFDVYLDNGVYKFVTVKNLDVIKKENYYEVNSKCYEEAKKLKKISNQAEFIASFYKNDLIKINGELYRVIGVNNDLLNRIEVNMIDITYREYLENMNDKRPPHIIKTIASKTQSIKKYSTDILGNLYEVKSKKHPQIIKKGSGGSKRTADGSEFEPKKKRKV

SEQ ID NO: 484 - protein, 1291 aa, Artificial Sequence
  Synthetic
MKRTADGSEFESPKKKRKVSEVEFSHEYWMRHALTLAKRARDEREVPVGAVLVLNNRVIGEGWNRAIGLHDPTAHAEIMALRQGGLVMQNYRLIDATLYVTFEPCVMCAGAMIHSRIGRVVFGVRNSKRGAAGSLMNVLNYPGMNHRVEITEGILADECAALLCDFYRMPRQVFNAQKKAQSSINSGGSSGGSSGSETPGTSESATPESSGGSSGGSGKRNYILGLAIGITSVGYGIIDYETRDVIDAGVRLFKEANVENNEGRRSKRGARRLKRRRRHRIQRVKKLLFDYNLLTDHSELSGINPYEARVKGLSQKLSEEEFSAALLHLAKRRGVHNVNEVEEDTGNELSTKEQISRNSKALEEKYVAELQLERLKKDGEVRGSINRFKTSDYVKEAKQLLKVQKAYHQLDQSFIDTYIDLLETRRTYYEGPGEGSPFGWKDIKEWYEMLMGHCTYFPEELRSVKYAYNADLYNALNDLNNLVITRDENEKLEYYEKFQIIENVFKQKKKPTLKQIAKEILVNEEDIKGYRVTSTGKPEFTNLKVYHDIKDITARKEIIENAELLDQIAKILTIYQSSEDIQEELTNLNSELTQEEIEQISNLKGYTGTHNLSLKAINLILDELWHTNDNQIAIFNRLKLVPKKVDLSQQKEIPTTLVDDFILSPVVKRSFIQSIKVINAIIKKYGLPNDIIIELAREKNSKDAQKMINEMQKRNRQTNERIEEIIRTTGKENAKYLIEKIKLHDMQEGKCLYSLEAIPLEDLLNNPFNYEVDHIIPRSVSFDNSFNNKVLVKQEENSKKGNRTPFQYLSSSDSKISYETFKKHILNLAKGKGRISKTKKEYLLEERDINRFSVQKDFINRNLVDTRYATRGLMNLLRSYFRVNNLDVKVKSINGGFTSFLRRKWKFKKERNKGYKHHAEDALIIANADFIFKEWKKLDKAKKVMENQMFEEKQAESMPEIETEQEYKEIFITPHQIKHIKDFKDYKYSHRVDKKPNRKLINDTLYSTRKDDKGNTLIVNNLNGLYDKDNDKLKKLINKSPEKLLMYHHDPQTYQKLKLIMEQYGDEKNPLYKYYEETGNYLTKYSKKDNGPVIKKIKYYGNKLNAHLDITDDYPNSRNKVVKLSLKPYRFDVYLDNGVYKFVTVKNLDVIKKENYYEVNSKCYEEAKKLKKISNQAEFIASFYKNDLIKINGELYRVIGVNNDLLNRIEVNMIDITYREYLENMNDKRPPHIIKTIASKTQSIKKYSTDILGNLYEVKSKKHPQIIKKGSGGSKRTADGSEFEPKKKRKV

SEQ ID NO: 485 - protein, 1823 aa, Artificial Sequence
  Synthetic
MKRTADGSEFESPKKKRKVSEVEFSHEYWMRHALTLAKRAWDEREVPVGAVLVHNNRVIGEGWNRPIGRHDPTAHAEIMALRQGGLVMQNYRLIDATLYVTLEPCVMCAGAMIHSRIGRVVFGARDAKTGAAGSLMDVLHHPGMNHRVEITEGILADECAALLSDFFRMRRQEIKAQKKAQSSTDSGGSSGGSSGSETPGTSESATPESSGGSSGGSSEVEFSHEYWMRHALTLAKRARDEREVPVGAVLVLNNRVIGEGWNRAIGLHDPTAHAEIMALRQGGLVMQNYRLIDATLYVTFEPCVMCAGAMIHSRIGRVVFGVRNSKRGAAGSLMNVLNYPGMNHRVEITEGILADECAALLCDFYRMPRQVFNAQKKAQSSINSGGSSGGSSGSETPGTSESATPESSGGSSGGSNIMNFFKTEITLANGEIRKRPLIETNGETGEIVWDKGRDFATVRKVLSMPQVNIVKKTEVQTGGFSKESILPKRNSDKLIARKKDWDPKKYGGFDSPTVAYSVLVVAKVEKGKSKKLKSVKELLGITIMERSSFEKNPIDFLEAKGYKEVKKDLIIKLPKYSLFELENGRKRMLASAGELQKGNELALPSKYVNFLYLASHYEKLKGSPEDNEQKQLFVEQHKHYLDEIIEQISEFSKRVILADANLDKVLSAYNKHRDKPIREQAENIIHLFTLTNLGAPAAFKYFDTTIDRKRYTSTKEVLDATLIHQSITGLYETRIDLSQLGGDGGSGGSGGSGGSGGSGGSGGDKKYSIGLAIGTNSVGWAVITDEYKVPSKKFKVLGNTDRHSIKKNLIGALLFDSGETAEATRLKRTARRRYTRRKNRICYLQEIFSNEMAKVDDSFFHRLEESFLVEEDKKHERHPIFGNIVDEVAYHEKYPTIYHLRKKLVDSTDKADLRLIYLALAHMIKFRGHFLIEGDLNPDNSDVDKLFIQLVQTYNQLFEENPINASGVDAKAILSARLSKSRRLENLIAQLPGEKKNGLFGNLIALSLGLTPNFKSNFDLAEDAKLQLSKDTYDDDLDNLLAQIGDQYADLFLAAKNLSDAILLSDILRVNTEITKAPLSASMIKRYDEHHQDLTLLKALVRQQLPEKYKEIFFDQSKNGYAGYIDGGASQEEFYKFIKPILEKMDGTEELLVKLNREDLLRKQRTFDNGSIPHQIHLGELHAILRRQEDFYPFLKDNREKIEKILTFRIPYYVGPLARGNSRFAWMTRKSEETITPWNFEEVVDKGASAQSFIERMTNFDKNLPNEKVLPKHSLLYEYFTVYNELTKVKYVTEGMRKPAFLSGEQKKAIVDLLFKTNRKVTVKQLKEDYFKKIECFDSVEISGVEDRFNASLGTYHDLLKIIKDKDFLDNEENEDILEDIVLTLTLFEDREMIEERLKTYAHLFDDKVMKQLKRRRYTGWGRLSRKLINGIRDKQSGKTILDFLKSDGFANRNFMQLIHDDSLTFKEDIQKAQVSGQGDSLHEHIANLAGSPAIKKGILQTVKVVDELVKVMGRHKPENIVIEMARENQTTQKGQKNSRERMKRIEEGIKELGSQILKEHPVENTQLQNEKLYLYYLQNGRDMYVDQELDINRLSDYDVDHIVPQSFLKDDSIDNKVLTRSDKNRGKSDNVPSEEVVKKMKNYWRQLLNAKLITQRKFDNLTKAERGGLSELDKAGFIKRQLVETRQITKHVAQILDSRMNTKYDENDKLIREVKVITLKSKLVSDFRKDFQFYKVREINNYHHAHDAYLNAVVGTALIKKYPKLESEFVYGDYKVYDVRKMIAKSEQEIGKATAKYFFYSSGGSKRTADGSEFEPKKKRKV

SEQ ID NO: 486 - protein, 1803 aa, Artificial Sequence
  Synthetic
MKRTADGSEFESPKKKRKVSEVEFSHEYWMRHALTLAKRAWDEREVPVGAVLVHNNRVIGEGWNRPIGRHDPTAHAEIMALRQGGLVMQNYRLIDATLYVTLEPCVMCAGAMIHSRIGRVVFGARDAKTGAAGSLMDVLHHPGMNHRVEITEGILADECAALLSDFFRMRRQEIKAQKKAQSSTDSGGSSGGSSGSETPGTSESATPESSGGSSGGSSEVEFSHEYWMRHALTLAKRARDEREVPVGAVLVLNNRVIGEGWNRAIGLHDPTAHAEIMALRQGGLVMQNYRLIDATLYVTFEPCVMCAGAMIHSRIGRVVFGVRNSKRGAAGSLMNVLNYPGMNHRVEITEGILADECAALLCDFYRMPRQVFNAQKKAQSSINSGGSSGGSSGSETPGTSESATPESSGGSSGGSDKKYSIGLAIGTNSVGWAVITDEYKVPSKKFKVLGNTDRHSIKKNLIGALLFDSGETAEATRLKRTARRRYTRRKNRICYLQEIFSNEMAKVDDSFFHRLEESFLVEEDKKHERHPIFGNIVDEVAYHEKYPTIYHLRKKLVDSTDKADLRLIYLALAHMIKFRGHFLIEGDLNPDNSDVDKLFIQLVQTYNQLFEENPINASGVDAKAILSARLSKSRRLENLIAQLPGEKKNGLFGNLIALSLGLTPNFKSNFDLAEDAKLQLSKDTYDDDLDNLLAQIGDQYADLFLAAKNLSDAILLSDILRVNTEITKAPLSASMIKRYDEHHQDLTLLKALVRQQLPEKYKEIFFDQSKNGYAGYIDGGASQEEFYKFIKPILEKMDGTEELLVKLNREDLLRKQRTFDNGSIPHQIHLGELHAILRRQEDFYPFLKDNREKIEKILTFRIPYYVGPLARGNSRFAWMTRKSEETITPWNFEEVVDKGASAQSFIERMTNFDKNLPNEKVLPKHSLLYEYFTVYNELTKVKYVTEGMRKPAFLSGEQKKAIVDLLFKTNRKVTVKQLKEDYFKKIECFDSVEISGVEDRFNASLGTYHDLLKIIKDKDFLDNEENEDILEDIVLTLTLFEDREMIEERLKTYAHLFDDKVMKQLKRRRYTGWGRLSRKLINGIRDKQSGKTILDFLKSDGFANRNFMQLIHDDSLTFKEDIQKAQVSGQGDSLHEHIANLAGSPAIKKGILQTVKVVDELVKVMGRHKPENIVIEMARENQTTQKGQKNSRERMKRIEEGIKELGSQILKEHPVENTQLQNEKLYLYYLQNGRDMYVDQELDINRLSDYDVDHIVPQSFLKDDSIDNKVLTRSDKNRGKSDNVPSEEVVKKMKNYWRQLLNAKLITQRKFDNLTKAERGGLSELDKAGFIKRQLVETRQITKHVAQILDSRMNTKYDENDKLIREVKVITLKSKLVSDFRKDFQFYKVREINNYHHAHDAYLNAVVGTALIKKYPKLESEFVYGDYKVYDVRKMIAKSEQEIGKATAKYFFYSNIMNFFKTEITLANGEIRKRPLIETNGETGEIVWDKGRDFATVRKVLSMPQVNIVKKTEVQTGGFSKESILPKRNSDKLIARKKDWDPKKYGGFVSPTVAYSVLVVAKVEKGKSKKLKSVKELLGITIMERSSFEKNPIDFLEAKGYKEVKKDLIIKLPKYSLFELENGRKRMLASARELQKGNELALPSKYVNFLYLASHYEKLKGSPEDNEQKQLFVEQHKHYLDEIIEQISEFSKRVILADANLDKVLSAYNKHRDKPIREQAENIIHLFTLTNLGAPAAFKYFDTTIDRKQYRSTKEVLDATLIHQSITGLYETRIDLSQLGGDSGGSKRTADGSEFEPKKKRKV

SEQ ID NO: 487 - protein, 1605 aa, Artificial Sequence
  Synthetic
MKRTADGSEFESPKKKRKVSEVEFSHEYWMRHALTLAKRARDEREVPVGAVLVLNNRVIGEGWNRAIGLHDPTAHAEIMALRQGGLVMQNYRLIDATLYVTFEPCVMCAGAMIHSRIGRVVFGVRNSKRGAAGSLMNVLNYPGMNHRVEITEGILADECAALLCDFYRMPRQVFNAQKKAQSSINSGGSSGGSSGSETPGTSESATPESSGGSSGGSDKKYSIGLAIGTNSVGWAVITDEYKVPSKKFKVLGNTDRHSIKKNLIGALLFDSGETAEATRLKRTARRRYTRRKNRICYLQEIFSNEMAKVDDSFFHRLEESFLVEEDKKHERHPIFGNIVDEVAYHEKYPTIYHLRKKLVDSTDKADLRLIYLALAHMIKFRGHFLIEGDLNPDNSDVDKLFIQLVQTYNQLFEENPINASGVDAKAILSARLSKSRRLENLIAQLPGEKKNGLFGNLIALSLGLTPNFKSNFDLAEDAKLQLSKDTYDDDLDNLLAQIGDQYADLFLAAKNLSDAILLSDILRVNTEITKAPLSASMIKRYDEHHQDLTLLKALVRQQLPEKYKEIFFDQSKNGYAGYIDGGASQEEFYKFIKPILEKMDGTEELLVKLNREDLLRKQRTFDNGSIPHQIHLGELHAILRRQEDFYPFLKDNREKIEKILTFRIPYYVGPLARGNSRFAWMTRKSEETITPWNFEEVVDKGASAQSFIERMTNFDKNLPNEKVLPKHSLLYEYFTVYNELTKVKYVTEGMRKPAFLSGEQKKAIVDLLFKTNRKVTVKQLKEDYFKKIECFDSVEISGVEDRFNASLGTYHDLLKIIKDKDFLDNEENEDILEDIVLTLTLFEDREMIEERLKTYAHLFDDKVMKQLKRRRYTGWGRLSRKLINGIRDKQSGKTILDFLKSDGFANRNFMQLIHDDSLTFKEDIQKAQVSGQGDSLHEHIANLAGSPAIKKGILQTVKVVDELVKVMGRHKPENIVIEMARENQTTQKGQKNSRERMKRIEEGIKELGSQILKEHPVENTQLQNEKLYLYYLQNGRDMYVDQELDINRLSDYDVDHIVPQSFLKDDSIDNKVLTRSDKNRGKSDNVPSEEVVKKMKNYWRQLLNAKLITQRKFDNLTKAERGGLSELDKAGFIKRQLVETRQITKHVAQILDSRMNTKYDENDKLIREVKVITLKSKLVSDFRKDFQFYKVREINNYHHAHDAYLNAVVGTALIKKYPKLESEFVYGDYKVYDVRKMIAKSEQEIGKATAKYFFYSNIMNFFKTEITLANGEIRKRPLIETNGETGEIVWDKGRDFATVRKVLSMPQVNIVKKTEVQTGGFSKESILPKRNSDKLIARKKDWDPKKYGGFVSPTVAYSVLVVAKVEKGKSKKLKSVKELLGITIMERSSFEKNPIDFLEAKGYKEVKKDLIIKLPKYSLFELENGRKRMLASARELQKGNELALPSKYVNFLYLASHYEKLKGSPEDNEQKQLFVEQHKHYLDEIIEQISEFSKRVILADANLDKVLSAYNKHRDKPIREQAENIIHLFTLTNLGAPAAFKYFDTTIDRKQYRSTKEVLDATLIHQSITGLYETRIDLSQLGGDSGGSKRTADGSEFEPKKKRKV

SEQ ID NO: 488 - protein, 1534 aa, Artificial Sequence
  Synthetic
MKRTADGSEFESPKKKRKVSEVEFSHEYWMRHALTLAKRAWDEREVPVGAVLVHNNRVIGEGWNRPIGRHDPTAHAEIMALRQGGLVMQNYRLIDATLYVTLEPCVMCAGAMIHSRIGRVVFGARDAKTGAAGSLMDVLHHPGMNHRVEITEGILADECAALLSDFFRMRRQEIKAQKKAQSSTDSGGSSGGSSGSETPGTSESATPESSGGSSGGSSEVEFSHEYWMRHALTLAKRARDEREVPVGAVLVLNNRVIGEGWNRAIGLHDPTAHAEIMALRQGGLVMQNYRLIDATLYVTFEPCVMCAGAMIHSRIGRVVFGVRNSKRGAAGSLMNVLNYPGMNHRVEITEGILADECAALLCDFYRMPRQVFNAQKKAQSSINSGGSSGGSSGSETPGTSESATPESSGGSSGGSDKKYSIGLDIGTNSVGWAVITDEYKVPSKKFKVLGNTDRHSIKKNLIGALLFDSGETAEATRLKRTARRRYTRRKNRICYLQEIFSNEMAKVDDSFFHRLEESFLVEEDKKHERHPIFGNIVDEVAYHEKYPTIYHLRKKLVDSTDKADLRLIYLALAHMIKFRGHFLIEGDLNPDNSDVDKLFIQLVQTYNQLFEENPINASGVDAKAILSARLSKSRRLENLIAQLPGEKKNGLFGNLIALSLGLTPNFKSNFDLAEDAKLQLSKDTYDDDLDNLLAQIGDQYADLFLAAKNLSDAILLSDILRVNTEITKAPLSASMIKRYDEHHQDLTLLKALVRQQLPEKYKEIFFDQSKNGYAGYIDGGASQEEFYKFIKPILEKMDGTEELLVKLNREDLLRKQRTFDNGSIPHQIHLGELHAILRRQEDFYPFLKDNREKIEKILTFRIPYYVGPLARGNSRFAWMTRKSEETITPWNFEEVVDKGASAQSFIERMTNFDKNLPNEKVLPKHSLLYEYFTVYNELTKVKYVTEGMRKPAFLSGEQKKAIVDLLFKTNRKVTVKQLKEDYFKKIECFDSVEISGVEDRFNASLGTYHDLLKIIKDKDFLDNEENEDILEDIVLTLTLFEDREMIEERLKTYAHLFDDKVMKQLKRRRYTGWGRLSRKLINGIRDKQSGKTILDFLKSDGFANRNFMQLIHDDSLTFKEDIQKAQVSGQGDSLHEHIANLAGSPAIKKGILQTVKVVDELVKVMGRHKPENIVIEMARENQTTQKGQKNSRERMKRIEEGIKELGSQILKEHPVENTQLQNEKLYLYYLQNGRDMYVDQELDINRLSDYDVDHIVPQSFLKDDSIDNKVLTRSDKNRGKSDNVPSEEVVKKMKNYWRQLLNAKLITQRKFDNLTKAERGGLSELDKAGFIKRQLVETRQITKHVAQILDSRMNTKYDENDKLIREVKVITLKSKLVSDFRKDFQFYKVREINNYHHAHDAYLNAVVGTALIKKYPKLESEFVYGDYKVYDVRKMIAKSEQEIGKATAKYFFYSNIMNFFKTEITLANGEIRKRPLIETNGETGEIVWDKGRDFATVRKVLSMPQVNIVKKTESGGSKRTADGSEFEPKKKRKV

SEQ ID NO: 489 - protein, 1336 aa, Artificial Sequence
  Synthetic
MKRTADGSEFESPKKKRKVSEVEFSHEYWMRHALTLAKRARDEREVPVGAVLVLNNRVIGEGWNRAIGLHDPTAHAEIMALRQGGLVMQNYRLIDATLYVTFEPCVMCAGAMIHSRIGRVVFGVRNSKRGAAGSLMNVLNYPGMNHRVEITEGILADECAALLCDFYRMPRQVFNAQKKAQSSINSGGSSGGSSGSETPGTSESATPESSGGSSGGSDKKYSIGLDIGTNSVGWAVITDEYKVPSKKFKVLGNTDRHSIKKNLIGALLFDSGETAEATRLKRTARRRYTRRKNRICYLQEIFSNEMAKVDDSFFHRLEESFLVEEDKKHERHPIFGNIVDEVAYHEKYPTIYHLRKKLVDSTDKADLRLIYLALAHMIKFRGHFLIEGDLNPDNSDVDKLFIQLVQTYNQLFEENPINASGVDAKAILSARLSKSRRLENLIAQLPGEKKNGLFGNLIALSLGLTPNFKSNFDLAEDAKLQLSKDTYDDDLDNLLAQIGDQYADLFLAAKNLSDAILLSDILRVNTEITKAPLSASMIKRYDEHHQDLTLLKALVRQQLPEKYKEIFFDQSKNGYAGYIDGGASQEEFYKFIKPILEKMDGTEELLVKLNREDLLRKQRTFDNGSIPHQIHLGELHAILRRQEDFYPFLKDNREKIEKILTFRIPYYVGPLARGNSRFAWMTRKSEETITPWNFEEVVDKGASAQSFIERMTNFDKNLPNEKVLPKHSLLYEYFTVYNELTKVKYVTEGMRKPAFLSGEQKKAIVDLLFKTNRKVTVKQLKEDYFKKIECFDSVEISGVEDRFNASLGTYHDLLKIIKDKDFLDNEENEDILEDIVLTLTLFEDREMIEERLKTYAHLFDDKVMKQLKRRRYTGWGRLSRKLINGIRDKQSGKTILDFLKSDGFANRNFMQLIHDDSLTFKEDIQKAQVSGQGDSLHEHIANLAGSPAIKKGILQTVKVVDELVKVMGRHKPENIVIEMARENQTTQKGQKNSRERMKRIEEGIKELGSQILKEHPVENTQLQNEKLYLYYLQNGRDMYVDQELDINRLSDYDVDHIVPQSFLKDDSIDNKVLTRSDKNRGKSDNVPSEEVVKKMKNYWRQLLNAKLITQRKFDNLTKAERGGLSELDKAGFIKRQLVETRQITKHVAQILDSRMNTKYDENDKLIREVKVITLKSKLVSDFRKDFQFYKVREINNYHHAHDAYLNAVVGTALIKKYPKLESEFVYGDYKVYDVRKMIAKSEQEIGKATAKYFFYSNIMNFFKTEITLANGEIRKRPLIETNGETGEIVWDKGRDFATVRKVLSMPQVNIVKKTESGGSKRTADGSEFEPKKKRKV

SEQ ID NO: 490 - DNA, 19 bp, Artificial Sequence
  Synthetic
attttgtctaaaacctgta

SEQ ID NO: 491 - DNA, 47 bp, Artificial Sequence
  Synthetic
gagcacctccttcttttgattttgtctaaaacctgtaaggaaaataa

SEQ ID NO: 492 - DNA, 47 bp, Artificial Sequence
  Synthetic
gagcacctccttcttttgattttgtctgaaacctgtaaggaaaataa

SEQ ID NO: 493 - DNA, 47 bp, Artificial Sequence
  Synthetic
gagcacctccttcttttggttttgtctaaaacctgtaaggaaaataa

SEQ ID NO: 494 - DNA, 47 bp, Artificial Sequence
  Synthetic
gagcacctccttcttttggttttgtctgaaacctgtaaggaaaataa

SEQ ID NO: 495 - DNA, 47 bp, Artificial Sequence
  Synthetic
gagcacctccttcttttgattttgtctggaacctgtaaggaaaataa

SEQ ID NO: 496 - DNA, 47 bp, Artificial Sequence
  Synthetic
gagcacctccttcttttgattttgtctagaacctgtaaggaaaataa

SEQ ID NO: 497 - DNA, 47 bp, Artificial Sequence
  Synthetic
gagcacctccttcttttgattttgtctgagacctgtaaggaaaataa

SEQ ID NO: 498 - DNA, 47 bp, Artificial Sequence
  Synthetic
gagcacctccttcttttgattttgtctaagacctgtaaggaaaataa

SEQ ID NO: 499 - DNA, 47 bp, Artificial Sequence
  Synthetic
gagcacctccttcttttgattttgtctgaagcctgtaaggaaaataa

SEQ ID NO: 500 - DNA, 47 bp, Artificial Sequence
  Synthetic
gagcacctccttcttttgattttgtctaaagcctgtaaggaaaataa

SEQ ID NO: 501 - DNA, 47 bp, Artificial Sequence
  Synthetic
gagcacctccttcttttgattttgtttaaaacctgtaaggaaaataa

SEQ ID NO: 502 - DNA, 50 bp, Artificial Sequence
  Synthetic
gagcaccttccttctttttgattttgtctaaaaccctgtaaggaaaataa

SEQ ID NO: 503 - DNA, 50 bp, Artificial Sequence
  Synthetic
gagcaccttccttctttttgattttgtctgaaaccctgtaaggaaaataa

SEQ ID NO: 504 - DNA, 50 bp, Artificial Sequence
  Synthetic
gagcaccttccttctttttggttttgtctaaaaccctgtaaggaaaataa

SEQ ID NO: 505 - DNA, 50 bp, Artificial Sequence
  Synthetic
gagcaccttccttctttttgattttgtctagaaccctgtaaggaaaataa

SEQ ID NO: 506 - DNA, 50 bp, Artificial Sequence
  Synthetic
gagcaccttccttctttttgattttgtctaagaccctgtaaggaaaataa

SEQ ID NO: 507 - DNA, 50 bp, Artificial Sequence
  Synthetic
gagcaccttccttctttttgattttgtctaaagccctgtaaggaaaataa

SEQ ID NO: 508 - DNA, 50 bp, Artificial Sequence
  Synthetic
gagcaccttccttctttttgattttgtttaaaaccctgtaaggaaaataa

SEQ ID NO: 509 - DNA, 50 bp, Artificial Sequence
  Synthetic
gagcaccttccttctttttgattttgtgtaaaaccctgtaaggaaaataa

SEQ ID NO: 510 - DNA, 50 bp, Artificial Sequence
  Synthetic
gagcaccttccttctttttgattttgtctaaaaccctgtgaggaaaataa

SEQ ID NO: 511 - DNA, 50 bp, Artificial Sequence
  Synthetic
gagcaccttccttctttttgattttgtcttaaaccctgtaaggaaaataa

SEQ ID NO: 512 - DNA, 50 bp, Artificial Sequence
  Synthetic
gagcaccttccttctttttgattttgtctaaaaccctgttaggaaaataa

SEQ ID NO: 513 - DNA, 24 bp, Artificial Sequence
  Synthetic
  misc_feature (22)..(22): n is a, c, g, or t
tttgtcttaaaaccctgtaagnaa

SEQ ID NO: 514 - DNA, 24 bp, Artificial Sequence
  Synthetic
tttgtcttaaaaccctgtaaggaa

SEQ ID NO: 515 - DNA, 24 bp, Artificial Sequence
  Synthetic
caagtcttgaaaccctgcaaggaa

SEQ ID NO: 516 - DNA, 24 bp, Artificial Sequence
  Synthetic
tttgtcttgaaaccctgtaaggaa

SEQ ID NO: 517 - DNA, 24 bp, Artificial Sequence
  Synthetic
tatgacttaaaaccctggaagtaa

SEQ ID NO: 518 - DNA, 24 bp, Artificial Sequence
  Synthetic
ctagtcttaaaaccctgagaggta

SEQ ID NO: 519 - DNA, 24 bp, Artificial Sequence
  Synthetic
tttgttttaaaacccaataagaaa

SEQ ID NO: 520 - DNA, 24 bp, Artificial Sequence
  Synthetic
attgtcttaaaacccagaagtaat

SEQ ID NO: 521 - DNA, 23 bp, Artificial Sequence
  Synthetic
attgtcttaaaacccagaagtaa

SEQ ID NO: 522 - DNA, 24 bp, Artificial Sequence
  Synthetic
aatgtcttaatatcctgtaagcta

SEQ ID NO: 523 - DNA, 24 bp, Artificial Sequence
  Synthetic
aatgtcttaaaacacagtaagaaa

SEQ ID NO: 524 - DNA, 24 bp, Artificial Sequence
  Synthetic
cttgtcttaacaccctgtaagcag

SEQ ID NO: 525 - DNA, 24 bp, Artificial Sequence
  Synthetic
aatgtcttaaaactctggaagaca

SEQ ID NO: 526 - DNA, 24 bp, Artificial Sequence
  Synthetic
tgtttcttaaaaccatgtaggcta

SEQ ID NO: 527 - DNA, 24 bp, Artificial Sequence
  Synthetic
aatgtctaaaaaccttataagcaa

SEQ ID NO: 528 - DNA, 24 bp, Artificial Sequence
  Synthetic
ctaatcttaaaaccctgcaagcaa

SEQ ID NO: 529 - DNA, 24 bp, Artificial Sequence
  Synthetic
ttggagttagaaacctgtgaggaa

SEQ ID NO: 530 - DNA, 23 bp, Artificial Sequence
  Synthetic
cttgtattaaaacctgtgagtaa

SEQ ID NO: 531 - DNA, 24 bp, Artificial Sequence
  Synthetic
cctttcttaaaaccctgcaagtaa

SEQ ID NO: 532 - DNA, 23 bp, Artificial Sequence
  Synthetic
ctttcttaaaaccctgcaagtaa

SEQ ID NO: 533 - DNA, 24 bp, Artificial Sequence
  Synthetic
taagtcttaaaacccaatagggaa

SEQ ID NO: 534 - DNA, 24 bp, Artificial Sequence
  Synthetic
tgtttcttaaactgctctaagaaa

SEQ ID NO: 535 - DNA, 24 bp, Artificial Sequence
  Synthetic
gttgtcttaaaactatgtaagtga

SEQ ID NO: 536 - DNA, 24 bp, Artificial Sequence
  Synthetic
aataccttaaaaccctggaagaaa

SEQ ID NO: 537 - DNA, 24 bp, Artificial Sequence
  Synthetic
tatgtattaaaaccctgtatgtaa

SEQ ID NO: 538 - DNA, 24 bp, Artificial Sequence
  Synthetic
agggtcttaaatccctgtcataaa

SEQ ID NO: 539 - DNA, 24 bp, Artificial Sequence
  Synthetic
tctgtgtttgtaccctctaaggaa

SEQ ID NO: 540 - DNA, 24 bp, Artificial Sequence
  Synthetic
cttgccttaataccctgtaaataa

SEQ ID NO: 541 - DNA, 24 bp, Artificial Sequence
  Synthetic
gctggcttaaaactctgtaagaaa

SEQ ID NO: 542 - DNA, 24 bp, Artificial Sequence
  Synthetic
tttctattaaaaccctggaaataa

SEQ ID NO: 543 - DNA, 24 bp, Artificial Sequence
  Synthetic
tatttgttaaaaccctaaaagtaa

SEQ ID NO: 544 - DNA, 23 bp, Artificial Sequence
  Synthetic
tttttttttaaacctccaagaaa

SEQ ID NO: 545 - DNA, 24 bp, Artificial Sequence
  Synthetic
ttgatattacaacaatgtaaggaa

SEQ ID NO: 546 - DNA, 24 bp, Artificial Sequence
  Synthetic
gttgtcttaccactctgagagcaa

SEQ ID NO: 547 - DNA, 22 bp, Artificial Sequence
  Synthetic
ttactctcaatccctgacgaaa

SEQ ID NO: 548 - DNA, 24 bp, Artificial Sequence
  Synthetic
tttgtcttaaagccctgtatcaaa

SEQ ID NO: 549 - DNA, 24 bp, Artificial Sequence
  Synthetic
tgtttcttgaatccttgtatgtaa

SEQ ID NO: 550 - DNA, 23 bp, Artificial Sequence
  Synthetic
tttgtcaaaaaccatgcaagcaa

SEQ ID NO: 551 - DNA, 24 bp, Artificial Sequence
  Synthetic
tttgtcttaaaacctggaagcaaa

SEQ ID NO: 552 - DNA, 23 bp, Artificial Sequence
  Synthetic
tttgtcttaaaacctggaagcaa

SEQ ID NO: 553 - DNA, 24 bp, Artificial Sequence
  Synthetic
attctcttagcacccttttagaaa

SEQ ID NO: 554 - DNA, 24 bp, Artificial Sequence
  Synthetic
tttctattaaaacagtatatggaa

SEQ ID NO: 555 - DNA, 25 bp, Artificial Sequence
  Synthetic
tgagtcctaaaaccctggtaagtaa

SEQ ID NO: 556 - DNA, 24 bp, Artificial Sequence
  Synthetic
ttagtgttaaatctctgtgataaa

SEQ ID NO: 557 - DNA, 24 bp, Artificial Sequence
  Synthetic
gttttcttaaaacccttaagtaaa

SEQ ID NO: 558 - DNA, 23 bp, Artificial Sequence
  Synthetic
gttttcttaaaacccttaagtaa

SEQ ID NO: 559 - DNA, 24 bp, Artificial Sequence
  Synthetic
tttgttttacaataatgtaataaa

SEQ ID NO: 560 - DNA, 24 bp, Artificial Sequence
  Synthetic
tagatcttaaaaccctagaagaaa

SEQ ID NO: 561 - DNA, 25 bp, Artificial Sequence
  Synthetic
ttagatcttaaaaccctagaagaaa

SEQ ID NO: 562 - DNA, 24 bp, Artificial Sequence
  Synthetic
tttgccataaaatgctgatagcaa

SEQ ID NO: 563 - DNA, 24 bp, Artificial Sequence
  Synthetic
tttctcttaaaaacccgaaaaaga

SEQ ID NO: 564 - DNA, 24 bp, Artificial Sequence
  Synthetic
atggtcctaaagccctgtaaggaa

SEQ ID NO: 565 - DNA, 24 bp, Artificial Sequence
  Synthetic
catgtcttaaaacaccaaaagcaa

SEQ ID NO: 566 - DNA, 24 bp, Artificial Sequence
  Synthetic
tgcatcttaaaacccagtaagaaa

SEQ ID NO: 567 - DNA, 24 bp, Artificial Sequence
  Synthetic
tttatcttaaaaccatagatggta

SEQ ID NO: 568 - DNA, 24 bp, Artificial Sequence
  Synthetic
aatattataaaaccctttaaggaa

SEQ ID NO: 569 - DNA, 24 bp, Artificial Sequence
  Synthetic
tttctcctaaagccttgtcagcat

SEQ ID NO: 570 - DNA, 24 bp, Artificial Sequence
  Synthetic
tttatctttaagacctggaatcaa

SEQ ID NO: 571 - DNA, 24 bp, Artificial Sequence
  Synthetic
tttgttgtaaaaccttgaaaacca

SEQ ID NO: 572 - DNA, 24 bp, Artificial Sequence
  Synthetic
catgtcttaaaacactaaaagcaa

SEQ ID NO: 573 - DNA, 24 bp, Artificial Sequence
  Synthetic
tgtgttttaaaatcctgtaagaaa

SEQ ID NO: 574 - DNA, 19 bp, Artificial Sequence
  Synthetic
gccagcattatgaaagtga
